(19) United States
(12) Patent Application Publication
(10) Pub. No.: US 2025/0319203 A1
(43) Pub. Date: Oct. 16, 2025

(54) COMPLEX AND USE THEREOF

(71) Applicant: EPIGENIC THERAPEUTICS PTE. LTD., Singapore (SG)

(72) Inventors: Shaoshuai MAO, Shanghai (CN); Ying ZANG, Shanghai (CN); Xiang WEI, Shanghai (CN); Hao LUO, Shanghai (CN)

(73) Assignee: EPIGENIC THERAPEUTICS PTE. LTD., Singapore (SG)

(21) Appl. No.: 19/245,463

(22) Filed: Jun. 23, 2025

Related U.S. Application Data
(63) Continuation of application No. PCT/CN2023/140808, filed on Dec. 22, 2023.

(30) Foreign Application Priority Data
Dec. 23, 2022 (CN) 202211663018.0
Nov. 2, 2023 (CN) 202311453875.2

(51) Int. Cl. A61K 48/00; C07K 14/39; C12N 9/22; C12N 15/11

(52) U.S. Cl. CPC A61K 48/005; C07K 14/39; C12N 9/226; C12N 15/111; C07K 2319/60; C07K 2319/80; C12N 2310/20

(57) ABSTRACT

A complex, comprising a first fusion and a second fusion, wherein one of the first fusion and the second fusion comprises a DNA methylation domain and at least one recruitment domain A, and the other fusion comprises a transcriptional repressor domain and at least one recruitment domain A′; and the recruitment domain A and the recruitment domain A′ interact with each other, so that one of the first fusion and the second fusion or a part thereof is recruited to the vicinity of the other fusion. Also provided are use of the complex in the preparation of a product for inhibiting target gene expression and the preparation of a drug.

### TECHNICAL FIELD

[0001] The present application relates to the field of biomedicine, and specifically to a complex for gene editing and uses thereof.

### BACKGROUND

[0002] Abnormalities in genomic epigenetic modifications are closely related to the occurrence and development of many diseases, such as metabolic disorders, cardiovascular diseases and cancer that are common in life. Gene epigenetic editing tools can achieve the purpose of corresponding gene transcriptional regulation without changing the gene sequence. This process will not cause permanent DNA damage, nor will it produce deleterious mutations and off-target effects; Moreover, epigenetic therapy can provide better therapeutic effects by regulating the activities of multiple genes at the same time, compensate for the shortcomings of gene therapy and provide new hope for treating such diseases. On the other hand, the development of gene site-directed modification technology makes it possible to carry out targeted epigenome editing and transcriptional regulation in a natural chromatin environment, especially the development of CRISPR/Cas9 technology.

[0003] Currently, the design of epigenetic modification and transcriptional regulation is mainly based on the combination of nucleases, among which the most effective is the combination of engineered dead nuclease (dCas9). Its design principle is to fuse various epigenetic regulatory effectors to dCas9, and realize the editing of the epigenome at specific genomic sites through the targeting of the nuclease in combination with the characteristics of the target DNA. These trans-regulatory domains and proteins function by hindering RNA polymerase binding to the dCas9 targeting sites in the promoter region or recruiting endogenous transcription complexes. A recent breakthrough in this field is to use a dCas-SunTag system to fuse multiple copies of a transcriptional activating or inhibitory protein to achieve the regulation of target gene transcription. For example, Hatada Izuho et al. (PCT/JP2021/006498) used a dCas9-GCN4 fusion to recruit fusions containing epigenetic modifiers (such as methyltransferase and histone acetyltransferase), transcriptional inhibitory regulators (such as ZIM3) and antibodies, thereby inhibiting the expression of the target gene regulated by it. Currently, the researches on the in vivo treatment of diseases caused by epigenetic abnormalities using transcriptional regulation and epigenetic site-directed modification technologies are still limited, and there are certain problems with the existing editing tools, such as the unsatisfactory recruitment effect of SunTag system, the low efficiency of transcriptional regulation, and the limited range of modification of target genes (such as methylation modification).

### SUMMARY

[0004] The present application provides a complex for gene editing and its encoding nucleic acid, vector, composition, cell and other forms. Compared with the existing gene editing methods based on SunTag recruitment strategy, the complex can achieve higher regulation efficiency and wider modification and regulation range of target genes. In addition, the complex of the present application can be used in the manufacture of a product for inhibiting expression of a target gene and a medicament.

[0005] In one aspect, the present application provides a complex comprising a first fusion and a second fusion, wherein the fusion of one of the first fusion and the second fusion comprises a DNA methylation domain and at least one recruitment domain A, and wherein the other fusion comprises a transcriptional repressor domain and at least one recruitment domain A′; wherein the recruitment domain A and the recruitment domain A′ are capable of interacting, such that the fusion of one of the first fusion and the second fusion or a portion thereof is capable of being recruited to the vicinity of the other fusion.

[0006] In some embodiments, the first fusion or the second fusion comprises a nucleic acid binding domain.

[0007] In some embodiments, the first fusion comprises a DNA methylation domain, a nucleic acid binding domain and at least one recruitment domain A, and the second fusion comprises a transcriptional repressor domain and at least one recruitment domain A′.

[0008] In some embodiments, the first fusion comprises, in order from N-terminus to C-terminus, a DNA methylation domain, a nucleic acid binding domain, and a recruitment domain A.

[0009] In some embodiments, the second fusion comprises, in order from N-terminus to C-terminus, a transcriptional repressor domain and a recruitment domain A′, or comprises, in order from N-terminus to C-terminus, a recruitment domain A′ and a transcriptional repressor domain.

[0010] In some embodiments, the first fusion comprises a transcriptional repressor domain, a nucleic acid binding domain and at least one recruitment domain A, and the second fusion comprises a DNA methylation domain and at least one recruitment domain A′.

[0011] In some embodiments, the first fusion comprises, in order from N-terminus to C-terminus, a recruitment domain A, a nucleic acid binding domain and a transcriptional repressor domain.

[0012] In some embodiments, the second fusion comprises, in order from N-terminus to C-terminus, a DNA methylation domain and a recruitment domain A′, or comprises, in order from N-terminus to C-terminus, a recruitment domain A′ and a DNA methylation domain.

[0013] In some embodiments, the complex is characterized in that: 1) the first fusion comprises, in order from N-terminus to C-terminus, a DNA methylation domain, a nucleic acid binding domain and a recruitment domain A, and the second fusion comprises, in order from N-terminus to C-terminus, a transcriptional repressor domain and a recruitment domain A′; or 2) the first fusion comprises, in order from N-terminus to C-terminus, a DNA methylation domain, a nucleic acid binding domain and a recruitment domain A, and the second fusion comprises, in order from N-terminus to C-terminus, a recruitment domain A′ and a transcriptional repressor domain; or 3) the first fusion comprises, in order from N-terminus to C-terminus, a recruitment domain A, a nucleic acid binding domain and a transcriptional repressor domain, and the second fusion comprises, in order from N-terminus to C-terminus, a DNA methylation domain and a recruitment domain A′; or 4) the first fusion comprises, in order from N-terminus to C-terminus, a recruitment domain A, a nucleic acid binding domain and a transcriptional repressor domain, and the second fusion comprises, in order from N-terminus to C-terminus, a recruitment domain A′ and a DNA methylation domain.

[0014] In some embodiments, the nucleic acid binding domain is a DNA binding domain.

[0015] In some embodiments, the DNA binding domain is selected from: a TALE domain, a zinc finger domain, a tetR domain, a meganuclease, a Cas protein, an Argonaute (Ago) protein, and a homolog, a modified form or a variant thereof.

[0016] In some embodiments, the DNA binding domain is capable of binding to a target sequence of a target locus.

[0017] In some embodiments, the DNA binding domain is capable of binding to a guide RNA.

[0018] In some embodiments, the guide RNA is capable of specifically recognizing and hybridizing to the target sequence of the target locus.

[0019] In some embodiments, the DNA binding domain is a Cas protein, and the Cas protein is a class II Cas nuclease.

[0020] In some embodiments, the Cas protein is selected from a class II type II Cas nuclease and a class II type V Cas nuclease.

[0021] In some embodiments, the Cas protein is a Cas9 or Cas 12 protein.

[0022] In some embodiments, the Cas protein is a dead Cas9 (dCas9) protein or a dead Cas12 (dCas12) protein.

[0023] In some embodiments, the DNA binding domain comprises an amino acid sequence as set forth in any one of SEQ ID NOs: 1-9, 343 and 344.

[0024] In some embodiments, the recruitment domain A is selected from any one of one of the following two sets of domains, and the recruitment domain A′ is selected from any one of the other of the following two sets of domains: 1) a general control nonderepressible protein 4 (GCN4), a GFP11 fragment derived from split green fluorescent protein (GFP), and a GVKESLV polypeptide; and 2) a single chain antibody (scFv), a GFP1-10 fragment derived from split green fluorescent protein (GFP) and a PDZ protein domain.

[0025] In some embodiments, in the complex: 1) the domain of one of the recruitment domain A and the recruitment domain A′ is a GCN4, and wherein the other domain is a scFv; or 2) the domain of one of the recruitment domain A and the recruitment domain A′ is a GFP11 fragment, and wherein the other domain is a GFP1-10; or 3) the domain of one of the recruitment domain A and the recruitment domain A′ is a GVKESLV, and wherein the other domain is a PDZ protein domain.

[0026] In some embodiments, the DNA methylation domain comprises at least one DNA methyltransferase or a functionally active fragment thereof.

[0027] In some embodiments, the DNA methyltransferase is selected from DNMT3A, DNMT3B, DNMT3c, DNMT1, DNMT2 and DNMT3L.

[0028] In some embodiments, the DNA methylation domain comprises at least one DNMT3A and at least one DNMT3L.

[0029] In some embodiments, the DNA methyltransferase comprises an amino acid sequence as set forth in any one of SEQ ID NOs: 19-24.

[0030] In some embodiments, the DNA methylation domain comprises a DNMT3A-DNMT3L domain or a DNMT3L-DNMT3A domain; wherein,-indicates that the domains at both ends thereof are directly or indirectly linked in order from N-terminus to C-terminus.

[0031] In some embodiments, the transcriptional repressor is selected from one or more of the following domains: KRAB, ZIM3, ZNF680, ZNF554, ZNF264, ZNF582, ZNF324, ZNF669, ZNF354A, ZNF82, ZNF595, ZNF419, ZNF566, ZIM2, EHMT2, SUV39H1, ZFPM1, TRIM28, EZH2, MXD1, SID, LSD1, HP1a, HDAC3, HDAC1, PRMT1, SETDB1, hSIRT1, ZNF436, ZNF257, ZNF675, ZNF490, ZNF320, ZNF331, ZNF816, ZNF41, ZNF189, ZNF528, ZNF543, ZNF140, ZNF610, ZNF350, ZNF8, ZNF30, ZNF98, ZNF677, ZNF596, ZNF214, ZNF37A, ZNF34, ZNF250, ZNF547, ZNF273, ZFP82, ZNF224, ZNF33A, ZNF45, ZNF175, ZNF184, ZFP28-1, ZFP28-2, ZNF18, ZNF213, ZNF394, ZFP1, ZFP14, ZNF416, ZNF557, ZNF729, ZNF254, ZNF764, ZNF785, ZNF10, CBX5, RYBP, YAF2, MGA, CBX1, SCMH1, MPP8, SUMO3, HERC2, BIN1, PCGF2, TOX, FOXA1, FOXA2, IRF2BP1, IRF2BP2, IRF2BPL IRF-2BP1_2 N-terminal domain, HOXA13, HOXB13, HOXC13, HOXA11, HOXC11, HOXC10, HOXA10, HOXB9, HOXA9, ZFP28, ZN334, ZN568, ZN37A, ZN181, ZN510, ZN862, ZN140, ZN208, ZN248, ZN571, ZN699, ZN726, ZIK1, ZNF2, Z705F, ZNF14, ZN471, ZN624, ZNF84, ZNF7, ZN891, ZN337, Z705G, ZN529, ZN729, ZN419, Z705A, ZN302, ZN486, ZN621, ZN688, ZN33A, ZN554, ZN878, ZN772, ZN224, ZN184, ZN544, ZNF57, ZN283, ZN549, ZN211, ZN615, ZN253, ZN226, ZN730, Z585A, ZN732, ZN681, ZN667, ZN649, ZN470, ZN484, ZN431, ZN382, ZN254, ZN124, ZN607, ZN317, ZN620, ZN141, ZN584, ZN540, ZN75D, ZN555, ZN658, ZN684, RBAK, ZN829, ZN582, ZN112, ZN716, HKR1, ZN350, ZN480, ZN416, ZNF92, ZN100, ZN736, ZNF74, ZN443, ZN195, ZN530, ZN782, ZN791, ZN331, Z354C, ZN157, ZN727, ZN550, ZN793, ZN235, ZN724, ZN573, ZN577, ZN789, ZN718, ZN300, ZN383, ZN429, ZN677, ZN850, ZN454, ZN257, ZN264, ZN485, ZN737, ZNF44, ZN596, ZN565, ZN543, ZFP69, SUMO1, ZNF12, ZN169, ZN433, ZN175, ZN347, ZNF25, ZN519, Z585B, ZN517, ZN846, ZN230, ZNF66, ZN713, ZN816, ZN426, ZN674, ZN627, ZNF20, Z587B, ZN316, ZN233, ZN611, ZN556, ZN234, ZN560, ZNF77, ZN682, ZN614, ZN785, ZN445, ZFP30, ZN225, ZN551, ZN610, ZN528, ZN284, ZN418, ZN490, ZN805, Z780B, ZN763, ZN285, ZNF85, ZN223, ZNF90, ZN557, ZN425, ZN229, ZN606, ZN155, ZN222, ZN442, ZNF91, ZN135, ZN778, ZN534, ZN586, ZN567, ZN440, ZN583, ZN441, ZNF43, ZN589, ZN563, ZN561, ZN136, ZN630, ZN527, ZN333, Z324B, ZN786, ZN709, ZN792, ZN599, ZN613, ZF69B, ZN799, ZN569, ZN564, ZN546, ZFP92, ZN723, ZN439, ZFP57, ZNF19, ZN404, ZN274, CBX3, ZN250, ZN570, ZN675, ZN695, ZN548, ZN132, ZN738, ZN420, ZN626, ZN559, ZN460, ZN268, ZN304, ZN605, ZN844, SUMO5, ZN101, ZN783, ZN417, ZN182, ZN823, ZN177, ZN197, ZN717, ZN669, ZN256, ZN251, CBX4, CDY2, CDYL2, ZN562, ZN461, Z324A, ZN766, ID2, ZN214, CBX7, ID1, CREM, SCX, ASCL1, ZN764, SCML2, TWST1, CREB1, TERF1, ID3, CBX8, GSX1, NKX22, ATF1, TWST2, ZNF17, TOX3, TOX4, ZMYM3, I2BP1, RHXF1, SSX2, 12BPL, ZN680, TRI68, HXA13, PHC3, TCF24, HXB13, HEY1, PHC2, ZNF81, FIGLA, SAM11, KMT2B, HEY2, JDP2, HXC13, ASCL4, HHEX, GSX2, ETV7, ASCL3, PHC1, OTP, I2BP2, VGLL2, HXA11, PDLI4, ASCL2, CDX4, ZN860, LMBL4, PDIP3, NKX25, CEBPB, ISL1, CDX2, PROP1, SIN3B, SMBT1, HXC11, HXC10, PRS6A, VSX1, NKX23, MTG16, HMX3, HMX1, KIF22, CSTF2, CEBPE, DLX2, PPARG, PRIC1, UNC4, BARX2, ALX3, TCF15, TERA, VSX2, HXD12, CDX1, TCF23, ALX1, HXA10, RX, CXXC5, SCML1, NFIL3, DLX6, MTG8, CEBPD, SEC13, FIP1, ALX4, LHX3, PRIC2, MAGI3, NELL1, PRRX1, MTG8R, RAX2, DLX3, DLX1, NKX26, NAB1, SAMD7, PITX3, WDR5, MEOX2, NAB2, DHX8, CBX6, EMX2, CPSF6, HXC12, KDM4B, LMBL3, PHX2A, EMX1, NC2B, DLX4, SRY, ZN777, ZN398, GATA3, BSH, SF3B4, TEAD1, TEAD3, RGAP1, PHF1, GATA2, FOXO3, ZN212, IRX4, ZBED6, LHX4, SIN3A, RBBP7, NKX61, R51A1, MB3L1, DLX5, NOTC1, TERF2, ZN282, RGS12, ZN840, SPI2B, PAX7, NKX62, ASXL2, FOXO1, GATA1, ZMYM5, LRP1, MIXL1, SGT1, LMCD1, CEBPA, SOX14, WTIP, PRP19, NKX11, RBBP4, DMRT2, SMCA2, and functionally active fragments thereof.

[0032] In some embodiments, the transcriptional repressor domain comprises an amino acid sequence as set forth in any one of SEQ ID NOs: 25-50.

[0033] In some embodiments, in the complex: 1) the fusion of one of the first fusion and the second fusion comprises a DNA methylation domain-dCas9 or dCas12 or TALE-n×GCN4, and wherein the other fusion comprises a transcriptional repressor domain-scFv; or 2) the fusion of one of the first fusion and the second fusion comprises a DNA methylation domain-dCas9 or dCas12 or TALE-scFv, and wherein the other fusion comprises a transcriptional repressor domain-GCN4; or 3) the fusion of one of the first fusion and the second fusion comprises a DNA methylation domain-dCas9 or dCas12 or TALE-n×GFP11, and wherein the other fusion comprises a transcriptional repressor domain-GFP1-10; or 4) the fusion of one of the first fusion and the second fusion comprises a DNA methylation domain-dCas9 or dCas12 or TALE-GFP1-10, and wherein the other fusion comprises a transcriptional repressor domain-GFP11; or 5) the fusion of one of the first fusion and the second fusion comprises a DNA methylation domain-dCas9 or dCas12 or TALE-n×GCN4, and wherein the other fusion comprises a scFv-transcriptional repressor domain; or 6) the fusion of one of the first fusion and the second fusion comprises a DNA methylation domain-dCas9 or dCas12 or TALE-scFv, and wherein the other fusion comprises a GCN4-transcriptional repressor domain; or 7) the fusion of one of the first fusion and the second fusion comprises a DNA methylation domain-dCas9 or dCas12 or TALE-n×GFP11, and wherein the other fusion comprises a GFP1-10-transcriptional repressor domain; or 8) the fusion of one of the first fusion and the second fusion comprises a DNA methylation domain-dCas9 or dCas12 or TALE-GFP1-10, and wherein the other fusion comprises a GFP11-transcriptional repressor domain; wherein-indicates that the domains at both ends thereof are directly or indirectly linked in order from N-terminus to C-terminus; n×GCN4 or n×GFP11 denotes respectively n copies of GCN4 or n copies of GFP11 linked by a linker sequence, and n is any integer selected from 1 to 20.

[0034] In some embodiments, the first fusion and/or the second fusion comprises an amino acid sequence as set forth in any one of SEQ ID NOs: 51-76, 78-82, 85-93, 103-105, 110-115, 123, 124, 361 and 362.

[0035] In some embodiments, the complex comprises an amino acid sequence as set forth in any one of SEQ ID NOs: 133-142, 153, 154, 158-163, 168, 345 and 346.

[0036] In some embodiments, in the complex: 1) the fusion of one of the first fusion and the second fusion comprises an n×GCN4-dCas9 or dCas12 or TALE-transcriptional repressor domain, and wherein the other fusion comprises a DNA methylation domain-scFv; or 2) the fusion of one of the first fusion and the second fusion comprises a scFv-dCas9 or dCas12 or TALE-transcriptional repressor domain, and wherein the other fusion comprises a DNA methylation domain-GCN4; or 3) the fusion of one of the first fusion and the second fusion comprises an n×GFP11-dCas9 or dCas12 or TALE-transcriptional repressor domain, and wherein the other fusion comprises a DNA methylation domain-GFP1-10; or 4) the fusion of one of the first fusion and the second fusion comprises a GFP1-10-dCas9 or dCas12 or TALE-transcriptional repressor domain, and wherein the other fusion comprises a DNA methylation domain-GFP11; or 5) the fusion of one of the first fusion and the second fusion comprises an n×GCN4-dCas9 or dCas12 or TALE-transcriptional repressor domain, and wherein the other fusion comprises a scFv-DNA methylation domain; or 6) the fusion of one of the first fusion and the second fusion comprises a scFv-dCas9 or dCas12 or TALE-transcriptional repressor domain, and wherein the other fusion comprises a GCN4-DNA methylation domain; or 7) the fusion of one of the first fusion and the second fusion comprises an n×GFP11-dCas9 or dCas12 or TALE-transcriptional repressor domain, and wherein the other fusion comprises a GFP1-10-DNA methylation domain; or 8) the fusion of one of the first fusion and the second fusion comprises a GFP1-10-dCas9 or dCas12 or TALE-transcriptional repressor domain, and wherein the other fusion comprises a GFP11-DNA methylation domain; wherein-indicates that the domains at both ends thereof are directly or indirectly linked in order from N-terminus to C-terminus; n×GCN4 or n×GFP11 denotes respectively n copies of GCN4 or n copies of GFP11 linked by a linker sequence, and n is any integer selected from 1 to 20.

[0037] In some embodiments, the first fusion and/or the second fusion comprises an amino acid sequence as set forth in any one of SEQ ID NOs: 83, 84, 94-102, 106-109, 116-122, 363 and 364.

[0038] In some embodiments, the complex comprises an amino acid sequence as set forth in any one of SEQ ID NOs: 143-152, 155-157, 164-167, 347 and 348.

[0039] In some embodiments, the complex further comprises a nuclear localization signal and/or a label domain.

[0040] In another aspect, the present application provides a nucleic acid encoding the complex described in the present application.

[0041] In some embodiments, the nucleic acid is a recombinant vector.

[0042] In some embodiments, the recombinant vector further comprises a non-coding region.

[0043] In some embodiments, the non-coding region is selected from an intron, a regulatory element, a promoter, an enhancer, a termination sequence, as well as a 5′ untranslated region and a 3′ untranslated region.

[0044] In some embodiments, the nucleic acid comprises a first nucleic acid fragment encoding the first fusion and a second nucleic acid fragment encoding the second fusion.

[0045] In some embodiments, the first nucleic acid fragment and the second nucleic acid fragment are linked by a nucleic acid fragment encoding a cleavage peptide.

[0046] In some embodiments, the cleavage peptide is a 2A peptide and/or an IRES.

[0047] In some embodiments, the 2A peptide is selected from P2A, T2A, E2A and F2A.

[0048] In some embodiments, the nucleic acid comprises a nucleic acid sequence as set forth in any one of SEQ ID NOs: 169-335 and 349-360.

[0049] In another aspect, the present application provides a delivery vector, comprising the complex described in the present application and/or the nucleic acid described in the present application, and optionally a liposome and/or a lipid nanoparticle.

[0050] In another aspect, the present application provides a composition comprising the complex described in the present application, the nucleic acid described in the present application, and/or the delivery vector described in the present application.

[0051] In another aspect, the present application provides a cell comprising the complex described in the present application, the nucleic acid described in the present application, the delivery vector described in the present application, and/or the composition described in the present application.

[0052] In another aspect, the present application provides a kit comprising the complex described in the present application, the nucleic acid described in the present application, the delivery vector described in the present application, the composition described in the present application, and/or the cell described in the present application.

[0053] In another aspect, the present application provides a method for regulating target gene expression, comprising administering the complex described in the present application, the nucleic acid described in the present application, the delivery vector described in the present application, the composition described in the present application, the cell described in the present application, and/or the kit described in the present application.

[0054] In some embodiments, the method comprises introducing the complex, the nucleic acid, the delivery vector, the composition, the cell, and/or the kit into a cell containing the target gene.

[0055] In some embodiments, the method comprises contacting the complex, the nucleic acid, the delivery vector, and/or the composition with a regulatory element near and/or of the target gene.

[0056] In some embodiments, the regulatory element comprises a core promoter, a proximal promoter, a distal enhancer, a silencer, an insulator element, a boundary element, and/or a locus control region.

[0057] In another aspect, the present application provides a method for treating or alleviating a disease or a disorder thereof associated with abnormal target gene expression and/or abnormal target gene activity, wherein the method comprises administering to a subject in need thereof an effective amount of the complex described in the present application, the nucleic acid described in the present application, the delivery vector described in the present application, the composition described in the present application, the cell described in the present application, and/or the kit described in the present application.

[0058] In another aspect, the present application provides the use of the complex described in the present application, the nucleic acid described in the present application, the delivery vector described in the present application, the composition described in the present application, the cell described in the present application, and/or the kit described in the present application in the manufacture of a medicament for treating or alleviating a disease or a disorder thereof associated with abnormal target gene expression and/or abnormal target gene activity.

[0059] In another aspect, the present application provides the complex described in the present application, the nucleic acid described in the present application, the delivery vector described in the present application, the composition described in the present application, the cell described in the present application or the kit described in the present application, which is used for treating or alleviating a disease or a disorder thereof associated with abnormal target gene expression and/or abnormal target gene activity.

[0060] Those skilled in the art can easily discern other aspects and advantages of the present application from the following detailed description. Only exemplary embodiments of the present application are shown and described in the following detailed description. As those skilled in the art will recognize, the teachings of the present application enable those skilled in the art to make changes in the specific embodiments disclosed without departing from the spirit and scope of the invention to which the present application relates. Accordingly, the drawings and descriptions in the specification of the present application are illustrative only and not restrictive.

### BRIEF DESCRIPTION OF DRAWINGS

[0061] The specific features of the invention to which the present application relates are set forth in the appended claims. The features and advantages of the invention to which the present application relates can be better understood by referring to the exemplary embodiments described in detail below and the accompanying drawings. A brief description of the accompanying drawings is as follows:

[0062] FIG. 1 shows a schematic structural view of a complex of the present application.

[0063] FIG. 2 shows the inhibitory effect of the complex of the present application on PTP1b gene expression.

[0064] FIGS. 3 and 4 show the inhibitory effect of the complex of the present application on PCSK9 gene expression.

### DETAILED DESCRIPTION

[0065] The embodiments of the invention of the present application will be described below with specific examples. Those skilled in the art may easily understand other advantages and effects of the invention of the present application from the disclosure of the specification.

### Term Definitions

[0066] In the present application, the term “recruitment” generally refers to the recruitment between protein molecules, which specifically refers to the recruitment of other molecules by proteins to perform specific biological functions. This recruitment mainly depends on the affinity of intermolecular interactions, and usually its affinity is considered to be related to the spatial structure of protein molecules and is relatively complicated. The interaction mechanism may illustratively include, but is not limited to, hydrogen bonding, ionic interaction, hydrophobic interaction, van der Waals force and other non-covalent bonding. For example, some proteins can recruit enzymes to catalyze chemical reactions, or recruit other proteins to form complexes. These recruitments are crucial for many cellular processes, such as signal transduction, DNA replication, and gene expression, among others.

[0067] In the present application, the term “nucleic acid binding domain” generally refers to a portion of a polypeptide or composition that is capable of binding to a specific nucleic acid, which may comprise a region that contacts a nucleic acid, a nucleic acid and/or a protein substance. Examples of nucleic acid binding domains may include, but are not limited to, a helix-turn-helix domain, a zinc finger domain, a leucine zipper (bZIP) domain, a winged helix domain, a winged helix-turn-helix domain, a helix-loop-helix domain, an HMG-box domain, a Wor3 domain, an immunoglobulin domain, a B3 domain, a TALE domain, and/or a CRISPR/CasX protein, and other domains.

[0068] In the present application, the term “DNA binding domain” generally refers to an independently folded protein domain containing at least one motif that recognizes double-stranded or single-stranded DNA. For example, the DNA binding domain may recognize a specific DNA sequence (recognition or regulatory sequence) or have a general affinity for DNA. In certain instances, other domains of the DNA binding domain often modulate the activity of the DNA binding domain; the DNA binding function may be structural or involve transcriptional regulation, and sometimes the two functions overlap. In certain embodiments of the methods and gene expression regulating molecules provided according to the present application, the DNA binding domain may comprise a (DNA) nuclease, such as a nuclease capable of targeting DNA in a sequence-specific manner or capable of being directed or instructed to target DNA in a sequence-specific manner, such as a CRISPR-Cas system, a zinc finger nuclease (ZFN), a transcription activator-like effector nuclease (TALEN), or a meganuclease. In some embodiments, the DNA binding domain is a DNA nuclease derived from the CRISPR-Cas system. For example, the DNA nuclease derived from the CRISPR-Cas system is a Cas protein.

[0069] In the present application, the term “TALE DNA binding domain” or “TALE” is a polypeptide comprising one or more TALE repeat domains/units. A naturally occurring TALE or a “wild-type TALE” is a nucleic acid binding protein secreted by numerous species of proteobacteria. A TALE polypeptide contains a nucleic acid binding domain composed of tandem repeats of highly conserved monomeric polypeptides that are predominantly 33, 34 or 35 amino acids in length and differ from each other predominantly at amino acid positions 12 and 13. In preferred embodiments, the nucleic acid is a DNA. As used herein, a polypeptide monomer of TALE is used to refer to a highly conserved repetitive polypeptide sequence within the TALE nucleic acid binding domain, and the term “repetitive variable diresidue” or “RVD” is used to refer to amino acids that are highly variable at positions 12 and 13 of the polypeptide monomer. A general representation of the TALE monomer contained within the DNA binding domain is X₁₋₁₁-(X₁₂X₁₃)-X₁₄₋₃₃ or 34 or 35, wherein the subscript indicates the amino acid position, and X denotes any amino acid. X₁₂X₁₃ indicates an RVD. In some TALE polypeptide monomers, the variable amino acid at position 13 is deleted or absent, and in such monomers, the RVD is composed of a single amino acid. In such cases, the RVD may alternatively be represented as X*, wherein X denotes X₁₂, and (*) indicates that X₁₃ is absent. The DNA binding domain comprises several repeats of the TALE monomer, and this can be represented as (X₁₋₁₁-(X₁₂X₁₃)-X₁₄₋₃₃ or 34 or 35) z, wherein in preferred embodiments, z is at least 5-40. In a further preferred embodiment, z is at least 10-26.

[0070] The TALE monomer has a nucleotide binding affinity determined by the type of amino acid within its RVD. For example, a polypeptide monomer with an RVD of NI preferentially binds to adenine (A), a polypeptide monomer with an RVD of NG preferentially binds to thymine (T), a polypeptide monomer with an RVD of HD preferentially binds to cytosine (C), and a monomer with an RVD of NN preferentially bind to adenine (A) and guanine (G). In some other embodiments, a monomer with an RVD of IG preferentially binds to T. Thus, the number and order of polypeptide monomer repeats in the nucleic acid binding domain of TALE determines its nucleic acid target specificity. In a further embodiment of the present application, a monomer with an RVD of NS recognizes all four base pairs, and can bind to A, T, G or C. The structure and function of TALEs are further described, e.g., in Moscou et al., Science 326:1501 (2009); Boch et al., Science 326:1509-1512 (2009); and Zhang et al., Nature Biotechnology 29:149-153 (2011), each of which is incorporated by reference in its entirety. The repeat domain of TALE is involved in the binding of TALE to its cognate target DNA sequence. These repeat units (or “repeat sequences”) exhibit at least some sequence homology to other TALE repeat sequences within naturally occurring TALE proteins. See, e.g., U.S. Patent Publication No. 20110301073. The TALE binding domain involved in the present application can be “engineered” to bind to a predetermined nucleotide sequence, for example, via engineering (altering one or more amino acids) of a recognition helix region of a naturally occurring TALE protein. Thus, an engineered DNA binding protein (TALE) is a non-naturally occurring protein. Non-limiting examples of methods for engineering DNA binding proteins are design and selection. The designed DNA binding proteins are non-naturally occurring proteins whose design and/or composition results primarily from rational criteria. Rational design criteria include the application of replacement rules and computational algorithms for processing information in an information database that stores existing TALE design and binding data. See, e.g., U.S. Pat. Nos. 6,140,081; 6,453,242; and 6,534,261; see also WO 98/53058; WO 98/53059; WO 98/53060; WO02/016536 and WO 03/016496, and U.S. Publication No. 20110301073.

[0071] In the present application, “Cas enzyme” is used interchangeably with “Cas protein”, “CRISPR protein”, “CRISPR enzyme”, “CRISPR-Cas protein”, “CRISPR-Cas enzyme”, “Cas”, “CRISPR effector” or “Cas effector protein”, and generally refers to a class of enzymes that are complementary to a CRISPR sequence and are capable of using the CRISPR sequence as a guide to recognize and cleave a specific DNA strand. Non-limiting examples of Cas proteins include: Cas1, Cas1B, Cas2, Cas3, Cas4, Cas5, Cas6, Cas7, Cas8, Cas9 (also known as Csn1 and Csx12), Cas10, Csy1, Csy2, Csy3, Cse1, Cse2, Csc1, Csc2, Csa5, Csn2, Csm2, Csm3, Csm4, Csm5, Csm6, Cmr1, Cmr3, Cmr4, Cmr5, Cmr6, Csb1, Csb2, Csb3, Csx17, Csx14, Csx10, Csx16, CsaX, Csx3, Csx1, Csx15, Csf1, Csf2, Csf3, Csf4, and/or homologs thereof, or modified forms thereof. These proteins are known, for example, the amino acid sequence of S. pyogenes Cas9 protein can be found in SwissProt database under accession number Q99ZW2.

[0072] In the present application, the term “class II Cas nuclease” generally refers to a class of Cas proteins that perform recognition and/or cleavage functions in the form of a single protein, as defined by the updated classification scheme for CRISPR/Cas loci (Makarova et al., (2015) Nat Rev Microbiol, 13 (11): 722-36; Shmakov et al., (2015) Mol Cell, 60:385-397).

[0073] In the present application, the term “class II type II Cas nuclease and class II type V Cas nuclease” generally refer to monoproteinous, RNA-guided endonucleases among class II Cas nucleases. Herein, type V-B Cas nuclease in types II and V requires tracrRNA (trans-activating CRISPR RNA) and crRNA (CRISPR RNA) to work together to function normally, and crRNA and tracrRNA can be artificially combined into a single guide RNA (sgRNA); type V-A Cas nuclease in type V requires the use of crRNA alone to perform the guide function. Non-limiting examples of class II type II Cas nucleases include Cas9 and its family-related nucleases, and non-limiting examples of class II type V Cas nucleases include Cas12a (also known as Cpf1), Cas12b (also known as C2c1), Cas12c (also known as C2c3), Cas12d (CasY), Cas12e (CasX), Cas12g, Cas12h, Cas12i, C2c1, C2c4, C2c5, C2c8, C2c9, C2c10, Cas14a, Cas14b, Cas14c nucleases and/or TnpB.

[0074] In the present application, the term “dCas” may refer to a dCas protein or a fragment thereof. For example, as used herein, “dCas9” may refer to a dCas9 protein or a fragment thereof. As used herein, the terms “iCas” and “dCas” are used interchangeably to refer to a catalytically inactive CRISPR-associated protein. In one embodiment, the dCas protein comprises one or more mutations in DNA cleavage domain. In one embodiment, the dCas protein comprises one or more mutations in RuvC or domain. In one embodiment, the dCas molecule comprises one or more mutations in both RuvC and HNH domains. In one embodiment, the dCas protein is a fragment of a wild-type Cas protein. In one embodiment, the dCas protein comprises a functional domain from a wild-type Cas protein, wherein the functional domain is selected from a Reel domain, a bridge helix domain, or a PAM interaction domain. In one embodiment, the nuclease activity of dCas is reduced by at least 40%, at least 45%, at least 50%, at least 55%, at least 60%, at least 65%, at least 70%, at least 75%, at least 80%, at least 85%, at least 90%, at least 95%, or at least 99% compared to the nuclease activity of the corresponding wild-type Cas protein.

[0075] In the present application, the term “capable of binding” is used interchangeably with “binding to”, “specifically recognizing”, “targeting”, etc., and generally refers to that the binding molecule (e.g., a gene expression regulatory molecule of the present application) is capable of interacting with a nucleotide at a target gene or a target site, or that the binding molecule (e.g., a gene expression regulatory molecule of the present application) has sufficient affinity for the target gene or the target site, such interaction may be by means of conjugation, coupling, attachment, providing complementarity, providing covalent or non-covalent force, improving binding stability, and the like.

[0076] In the present application, the terms “guide RNA”, “guide DNA” and “gRNA” are used interchangeably, and generally refer to a DNA molecule that can guide a nuclease (such as Argonaute, or Ago) to bind to and/or cleave a target gene. In some preferred embodiments, the guide DNA may include: a single-stranded DNA molecule (ssDNA), a single-stranded DNA molecule that is phosphorylated at the 5′ end, a single-stranded DNA molecule that is hydroxylated at the 5′ end, having a base fragment capable of being complementary to the target gene, and/or having a length of 8-35 nt. In some embodiments of the present application, the term “guide RNA” refers to an RNA that comprises: (1) an “activating” nucleotide sequence that binds to a guide RNA-guided endonuclease (e.g., a class II Cas nuclease, e.g., a type II, V, or VI Cas endonuclease) and activates the RNA-guided endonuclease; and (2) a “target” nucleotide sequence comprising a nucleotide sequence that hybridizes to a target nucleic acid. The “activating” nucleotide sequence and the “target” nucleotide sequence may be on separate RNA molecules (e.g., a “dual-guide RNA”); or they may be on the same RNA molecule (“single-guide RNA”, also known as sgRNA).

[0077] In the present application, the term “DNA methyltransferase” generally refers to an enzyme that catalyzes the transfer of a methyl group to a DNA. Non-limiting examples of DNA methyltransferases include DNMT1, DNMT 3A, DNMT 3B, and DNMT 3L. For example, through DNA methylation, a DNA methyltransferase can modify the activity of a DNA fragment (e.g., regulate gene expression) without altering the DNA sequence. As described herein, a gene expression regulatory molecule may comprise one or more (e.g., two) DNA methyltransferases. When a DNA methyltransferase is included as part of a gene expression regulatory molecule, the DNA methyltransferase may be referred to as a “DNA methyltransferase domain.” In various aspects, the DNA methyltransferase domain comprises a variant or homolog of an amino acid sequence having at least 50%, at least 55%, at least 60%, at least 65%, at least 70%, at least 75%, at least 80%, at least 85%, 90%, at least 91%, at least 92%, at least 93%, at least 94%, at least 95%, at least 96%, at least 97%, at least 98%, at least 99%, or 100% sequence identity to DNMT 3A. In various aspects, the DNA methyltransferase domain comprises a variant or homolog of an amino acid sequence having at least 50%, at least 55%, at least 60%, at least 65%, at least 70%, at least 75%, at least 80%, at least 85%, at least 90%, at least 91%, at least 92%, at least 93%, at least 94%, at least 95%, at least 96%, at least 97%, at least 98%, at least 99%, or 100% sequence identity to DNMT 3L.

[0078] In the present application, the term “functionally active fragment” generally refers to a fragment having a partial region of a full-length protein or nucleic acid but retaining or partially retaining the biological activity or function of the full-length protein or nucleic acid. For example, a functionally active fragment may retain or partially retain the ability of the full-length protein to bind to another molecule. For example, a functionally active fragment of a DNA methyltransferase may retain or partially retain the biologically active function of the full-length DNA methyltransferase in catalyzing the transfer of a methyl group to a DNA.

[0079] In the present application, the term “transcriptional repressor” generally refers to a substance and/or agent, such as a protein (eg, a transcription factor or a fragment thereof), that binds to a target nucleic acid sequence and causes a decrease in the expression level of a gene product associated with the target nucleic acid sequence. For example, the gene product may be an RNA (e.g., mRNA) transcribed from the gene or a polypeptide translated from an mRNA transcribed from the gene. Typically, an increase or decrease in the level of mRNA results in an increase or decrease in the level of polypeptide translated therefrom. Expression levels can be determined using standard techniques for measuring mRNA or protein. Non-limiting examples of transcriptional repressors include: an mSin3 interaction domain (SID) protein, a methyl-CpG-binding domain 2 (MBD2), a MBD3, a DNA methyltransferase (DNMT) 1 (DNMT1), a DNMT2A, a DNMT3A, a DNMT3B, a DNMT3L, a retinoblastoma protein (Rb), a methyl CpG binding protein 2 (Mecp2), a GATA-1 and its cofactor Fog1, a MAT2 modulator (ROM2), an Arabidopsis HD2A protein (AtHD2A), a lysine-specific demethylase 1 (LSD1), and/or a Krüppel-associated box (KRAB).

[0080] In the present application, the term “KRAB” is also referred to as “Krüppel-associated box domain” generally refers to a transcriptional repression domain of about 45 to about 75 amino acid residues that is found in the transcription factor of a human zinc finger protein. In various aspects, the KRAB domain may comprise a variant or homolog of an amino acid sequence having at least 50%, at least 55%, at least 60%, at least 65%, at least 70%, at least 75%, at least 80%, at least 85%, at least 90%, at least 91%, at least 92%, at least 93%, at least 94%, at least 95%, at least 96%, at least 97%, at least 98%, at least 99%, or 100% sequence identity to ZIM3 KRAB domain or KOX1 KRAB domain.

[0081] In the present application, the term “split green fluorescent protein” generally refers to a polypeptide that is capable of splitting and upon recombination immediately forms an active green fluorescent protein.

[0082] In the present application, the term “GCN4” is a transcription factor in S. cerevisiae, the “master regulator” in the yeast genome, regulating nearly one tenth of the yeast genome, and it is a highly conserved protein whose homolog in mammals is Activating Transcription factor-4 (ATF4).

[0083] In the present application, the term “PDZ protein” generally refers to a naturally occurring protein containing a PDZ domain. Exemplary PDZ proteins include CASK, MPP1, DLG1, DLG2, PSD95, NeDLG, TIP-33, SYNla, TIP-43, LDP, LIM, LIMK1, LIMK2, MPP2, NOS 1, AF6, PTN_4, prIL16, 41.8 kD, KIAA0559, RGS 12, KIAA0316, DVL1, TIP-40, TIAM1, MINT1, MAGI-1, MAGI-2, MAGI-3, KIAA0303, CBP, MINT3, TIP-2, KIAA0561 and/or TIP-1.

[0084] In the present application, the term “single chain antibody” or “scFv” generally refers to a single chain polypeptide containing one or more antigen binding sites. In addition, although the H and L chains of the Fv fragment are encoded by different genes, they can be linked together directly or via a peptide, for example, by recombinant methods, wherein a synthetic linker can be used to link the H and L chains into a single protein chain (known as a single chain antibody, sAb; Bird et al. 1988 Science 242:423-426; and Huston et al. 1988 PNAS 85:5879-5883). Such a single chain antibody is also encompassed within the term “antibody”, and can be used as a binding determinant in the design and preparation of multispecific binding molecules, and can be prepared by recombinant techniques or by enzymatic or chemical cleavage of intact antibodies.

[0085] In the present application, the term “direct or indirect binding” generally refers to a relatively “direct linking” or “indirect linking”. “Direct linking” generally refers to a direct linkage. For example, the direct linking may be a case where the linked substances (e.g., amino acid sequence segments) are directly linked without any spacer component (e.g., an amino acid residue or a derivative thereof); for example, an amino acid sequence segment X is directly linked to another amino acid sequence segment Y via an amide bond formed by the C-terminal amino acid of the amino acid sequence segment X and the N-terminal amino acid of the amino acid sequence segment Y. “Indirectly linking” generally refers to a case where the linked substances (e.g., amino acid sequence segments) are indirectly linked, and there is a spacer component (e.g., an amino acid residue or a derivative thereof) between them. For example, the spacer component used in the present application may be a stretch of amino acid residues, the sequence of which is selected from an amino acid sequence as set forth in any one of SEQ ID NOs: 125-132 (SEQ ID NO: 126 is GSG).

[0086] In the present application, a “nuclear localization sequence” or “NLS” generally refers to a peptide that directs a protein to the cell nucleus. In certain embodiments, the NLS comprises five basic positively charged amino acids. The NLS may be located anywhere on the peptide chain. In certain embodiments, the NLS is an NLS derived from SV40. In certain embodiments, the NLS comprises a sequence as set forth in any one of SEQ ID NOs: 338-340. In some embodiments, the NLS has an amino acid sequence that is at least 50%, 55%, 60%, 65%, 70%, 75%, 80%, 85%, 90%, 91%, 92%, 93%, 94%, 95%, 96%, 97%, 98%, 99%, or 100% identical to any one of SEQ ID NOs: 338-340.

[0087] In the present application, the term “label” refers to a peptide, which can be introduced into an expression vector, and which can be used to allow the deletion and/or purification of the expression product of one or more vector insertion fragments. Such labels are well known in the art, and include a radiolabeled amino acid or a polypeptide linked to a biotin moiety detectable by labeled avidin (e.g., streptavidin containing fluorescent label or enzymatic activity detectable by optical or colorimetric methods). Affinity labels such as FLAG, glutathione-S-transferase, maltose binding protein, cellulose binding domain, thioredoxin, NusA, mistin, chitin binding domain, cutinase, AGT, GFP and other widely used labels, such as those used in protein expression and purification systems. Further non-limiting examples for polypeptides include, but are not limited to, the following: a histidine label, a radioisotope or a radionuclide (e.g., 3H, 14C, 35S, 90Y, 99Tc, 111In, 1251, 177Lu, 166Ho or 153Sm); a fluorescent label (e.g., FITC, rhodamine, lanthanide phosphorus), an enzyme label (e.g., horseradish peroxidase, luciferase, alkaline phosphatase); a chemiluminescent label; a biotin group; a pendant polypeptide antigenic determinant recognized by a second reporter (e.g., leucine zipper pair sequence, a binding site for secondary antibody, metal binding domain, antigenic determinant marker); and a magnetic reagent, such as a gadolinium chelate.

[0088] In the present application, the term “nucleic acid” is used interchangeably with “polynucleotide”, “nucleotide”, “nucleotide sequence” and “oligonucleotide”, and generally refers to a nucleotide (e.g., deoxyribonucleotide or ribonucleotide) and a polymer thereof in single-, double-, or multi-stranded form or a complement thereof. For example, the nucleotide may be a ribonucleotide, a deoxyribonucleotide, or a modified version thereof. For example, the nucleotide may be a single-stranded and double-stranded DNA, a single-stranded and double-stranded RNA, and a hybrid molecule having a mixture of single-stranded and double-stranded DNA and RNA. For example, the nucleotides may include, but are not limited to, any type of RNA, such as mRNA, siRNA, miRNA, sgRNA, and guide RNA, and any type of DNA, genomic DNA, plasmid DNA, and minicircle DNA, and any fragments thereof. The terms also encompass nucleic acids containing known nucleotide analogs or modified backbone residues or linkages, which nucleic acids are synthetic, naturally occurring, and non-naturally occurring.

[0089] In the present application, the term “sequence encoding” or “nucleic acid encoding” generally refers to a nucleic acid (RNA or DNA molecule) comprising a nucleotide sequence encoding a protein. The coding sequence may further comprise initiation and termination signals operably linked to regulatory elements comprising a promoter and a polyadenylation signal capable of directing expression in cells of an individual or mammal to which the nucleic acid has been administered. The coding sequence can be codon optimized. In the present application, the term “intron” the term “intron” generally refers to a DNA fragment that has been transcribed, but has been removed from an RNA transcript by splicing together either end of the sequence (exon). An intron is considered to be an interfering sequence within the protein coding region of a gene, and usually does not contain the information represented by the protein produced by the gene.

[0090] In the present application, the term “recombinant vector” generally refers to a nucleic acid molecule capable of transporting it as well as another nucleic acid to which it is linked. One type of vector is a “plasmid”, which refers to a circular double-stranded DNA loop into which additional DNA segments can be ligated. Alternatively, the vector may be linear. Another type of vector is a viral vector, wherein the additional DNA segments can be ligated into the viral genome. Particular vectors are capable of autonomous replication within a host cell into which they are introduced (e.g., a bacterial vector having a bacterial origin of replication and an episomal mammalian vector). Other vectors (e.g., non-episomal mammalian vectors) can be integrated into the genome of the host cell upon introduction into the host cell, and thereby are replicated along with the host genome.

[0091] In the present application, the term “regulatory element” refers to a genetic element capable of controlling the expression of a nucleic acid sequence. For example, splicing signals, promoter sequences, polyadenylation signals, transcription termination sequences, upstream regulatory domains, replication origins, internal ribosome entry sites (“IRES”), enhancers and the like, together provide for the replication, transcription and translation of the coding sequence in a recipient cell. Not all of these control sequences need to be present.

[0092] In the present application, the term “promoter” generally refers to a nucleotide sequence that controls or regulates the transcription of a nucleotide sequence (e.g., a coding sequence) operably associated with the promoter. The coding sequence controlled or regulated by the promoter can encode a polypeptide and/or a functional RNA. Generally, a “promoter” refers to a nucleotide sequence comprising an RNA polymerase II binding site and directing the initiation of transcription. Generally, the promoter is located 5′ or upstream of the origin of the coding region relative to the corresponding coding sequence. The promoter may comprise other elements that act as regulators of gene expression; for example, a promoter region. In some embodiments, the promoter region may comprise at least one intron. Promoters may include, for example, constitutive, inducible, temporally regulated, developmentally regulated, chemically regulated, tissue-preferred and/or tissue-specific promoters for use in preparing recombinant nucleic acid molecules, such as “synthetic nucleic acid constructs” or “protein-RNA complexes”. These different types of promoters are known in the art.

[0093] In the present application, the term “enhancer” generally refers to a regulatory DNA sequence, for example 50-1500 bp, that can be bound by a protein (activator) to stimulate or enhance the transcription of a gene or several genes. These activators (also known as transcription factors) interact with mediator complexes and recruit polymerase II and general transcription factors, and then begin to transcribe genes. Enhancers are usually cis-acting, but can be located upstream or downstream of the initiation site of the gene or the gene they regulate. In addition, enhancers may be forward or backward oriented, and do not need to be located near the transcription initiation site to affect transcription, as some enhancers have been found hundreds of thousands of base pairs upstream or downstream of the initiation site. Enhancers can also be found within introns.

[0094] In the present application, the term “cleavage peptide” refers to a class of polypeptides capable of performing the function of cleavage proteins. For example, the cleavage peptide can achieve protein cleavage via ribosome skipping rather than protease hydrolysis. For example, the cleavage peptide may be a cleavage 2A peptide, which may include T2A, F2A, P2A and/or E2A.

[0095] In the present application, the term “delivery vector” generally refers to a transfer vehicle capable of delivering an agent (e.g., a nucleic acid molecule) to a target cell. The delivery vector can deliver the agent to a specific subclass of cells. For example, a delivery vector can be targeted to certain cell types by virtue of an inherent feature of the delivery vector or by a moiety coupled to the vector, contained within it (or bound to the vector, such that the moiety and the delivery vector are maintained together, such that the moiety is sufficient to target the delivery vector). The delivery vector can also increase the in vivo half-life of the agent to be delivered and/or the bioavailability of the agent to be delivered. Delivery vectors may include viral vectors, virus-like particles, polycationic vectors, peptide vectors, liposomes, and/or hybrid vectors. For example, if the target cell is a hepatocyte, the properties of the delivery vector (e.g., size, charge, and/or pH) may be effective to deliver the delivery vector and/or molecules encapsulated therein to the target cell, reduce immune clearance, and/or facilitate retention in the target cell.

[0096] In the present application, the term “liposome” generally refers to a vesicle having an internal space separated from the external medium by one or more bilayer membranes. In some embodiments, the bilayer membrane may be formed by amphoteric molecules, such as synthetic or naturally derived lipids containing spatially isolated hydrophilic and hydrophobic domains; In some other embodiments, the bilayer membrane may be formed by amphiphilic polymers and surfactants. In some embodiments, the liposome is a spherical vesicle structure composed of a monolayer or multilayer lipid bilayer surrounding an inner aqueous compartment, and a relatively impermeable outer lipophilic phospholipid bilayer. In some embodiments, liposomes are biocompatible, non-toxic, can deliver hydrophilic and lipophilic drug molecules, protect their cargo from degradation by plasma enzymes, and transport their cargo across biological membranes and blood-brain barrier (BBB). Liposomes can be made from several different types of lipids, such as phospholipids. The liposomes may comprise natural phospholipids and lipids (such as 1,2-distearoyl-sn-glycero-3-phosphatidylcholine (DSPC), sphingomyelin, phosphatidylcholine, monosialoganglioside, or any combination thereof. In order to modify the structure and properties of liposomes, several other additives can be added to the liposomes. For example, the liposomes may further comprise cholesterol, sphingomyelin and/or 1,2-dioleoyl-sn-glycero-3-phosphoethanolamine (DOPE), for example, to increase stability and/or prevent leakage of cargo inside the liposomes.

[0097] The term a “lipid nanoparticle (LNP)” generally refers to a particle comprising multiple (i.e., more than one) lipid molecules physically associated (e.g., covalently or non-covalently) to each other by intermolecular forces. LNPs may be, for example, microspheres (including unilamellar and multilamellar vesicles, such as liposomes), dispersed phases in emulsions, micelles, or internal phases in suspensions. LNPs can encapsulate nucleic acids within cationic lipid particles (eg, liposomes), and can be delivered to cells relatively easily. In some examples, the lipid nanoparticles do not contain any viral components, which helps to minimize safety and immunogenicity issues. The lipid particles are useful for in vitro, ex vivo and in vivo delivery. The lipid particles are also useful for cell populations of various sizes. The LNP of the present application can be readily prepared by various methods known in the art, such as by mixing an organic phase with an aqueous phase. The mixing of the two phases can be achieved by a microfluidic device and an impinging flow reactor. The more thoroughly the organic phase and the aqueous phase are mixed, the better the encapsulation efficiency and the particle size distribution of the obtained LNPs. Preferably, the particle size of LNP can be adjusted by changing the mixing speed of the organic phase and the aqueous phase. The faster the mixing speed, the smaller the particle size of the prepared LNPs. The encapsulation efficiency can be optimized by adjusting the N/P (ionizable lipid/nucleic acid) ratio of the LNP system. In some examples, LNPs can be used to deliver DNA molecules and/or RNA molecules (e.g., mRNA of Cas, sgRNA). In certain cases, LNPs can be used to deliver RNP complexes of Cas/gRNA. In some embodiments, LNPs are used to deliver mRNA and gRNA.

[0098] In the present application, the term “subject” generally refers to an animal, typically a mammal, such as a human, a non-human primate (ape, gibbon, gorilla, chimpanzee, orangutan, macaque), a domestic animal (dog and cat), a farm animal (poultry such as chicken and duck, horse, cattle, goat, sheep, pig) and an experimental animal (mouse, rat, rabbit, guinea pig). Human subjects include fetal, neonatal, infant, adolescent, and adult subjects. Subjects include animal disease models, such as mice and other animal models of blood coagulation diseases (such as HemA), and other animal models known to those skilled in the art.

[0099] In the present application, the term “comprising” generally means including the explicitly specified features, but not excluding other elements.

[0100] In the present application, the term “selected from” generally means including the selected objects and all combinations thereof. For example, “selected from (:) A, B and C” is intended to include all combinations of A, B and C, for example, A, B, C, A+B, A+C, B+C or A+B+C.

[0101] In the present application, the term “about” generally refers to a variation within a range of 0.5%-10% above or below a specified value, for example, 0.5%, 1%, 1.5%, 2%, 2.5%, 3%, 3.5%, 4%, 4.5%, 5%, 5.5%, 6%, 6.5%, 7%, 7.5%, 8%, 8.5%, 9%, 9.5%, or 10% above or below the specified value.

### DETAILED DESCRIPTION

[0102] In one aspect, the present application provides a complex comprising a first fusion and a second fusion, wherein the fusion of one of the first fusion and the second fusion comprises a DNA methylation domain and at least one recruitment domain A, and wherein the other fusion comprises a transcriptional repressor domain and at least one recruitment domain A′; wherein the recruitment domain A and the recruitment domain A′ are capable of interacting, such that the fusion of one of the first fusion and the second fusion or a portion thereof is capable of being recruited to the vicinity of the other fusion.

[0103] In another aspect, the present application provides a nucleic acid encoding the complex described in the present application. For example, the nucleic acid comprises DNA and/or mRNA. For example, the nucleic acid can be used to treat or alleviate a disease or a disorder thereof associated with abnormal target gene expression and/or abnormal target gene activity. In some embodiments, the nucleic acid is mRNA; one or more modification techniques can be used to produce a more stable mRNA. Known mRNA modification techniques can be roughly divided into three categories: using artificially synthesized non-natural ribonucleic acid instead of natural ribonucleic acid to synthesize mRNA; adding 5′ caps, 3′ poly (A) “tail” and UTR (untranslated region) sequences; and using special new formulation techniques to effectively protect mRNA. Among them, the preferred mRNA modification techniques may involve synthesizing mRNA by replacing natural ribonucleic acids with artificially synthesized non-natural ribonucleic acids. Chemical modifications on eukaryotic mRNA can be roughly divided into three categories: methylation, pseudouridine (ψ) and hypoxanthine. For example, the chemical modification may be selected from: pseudouridine, N1-methylpseudouridine, N1-ethylpseudouridine, 2-thiouridine, 4′-thiouridine, 5-methylcytosine, 2-thio-1-methyl-1-deaza-pseudouridine, 2-thio-1-methylpseudouridine, 2-thio-5-aza-uridine, 2-thio-dihydropseudouridine, 2-thio-dihydrouridine, 2-thio-pseudouridine, 4-methoxy-2-thio-pseudouridine, 4-methoxy-pseudouridine, 4-thio-1-methylpseudouridine, 4-thio-pseudouridine, 5-aza-uridine, dihydropseudouridine, 5-methyluridine, 5-methoxyuridine and 2′-O-methyluridine. For example, the nucleic acid is a recombinant vector comprising a nucleic acid encoding the complex described in the present application. For example, a recombinant vector may refer to a nucleic acid molecule capable of transporting another nucleic acid to which it is linked. Recombinant vectors may include single-stranded, double-stranded, or partially double-stranded nucleic acid molecules; nucleic acid molecules comprising one or more free ends, no free ends (e.g., circular); nucleic acid molecules comprising DNA, RNA, or both; and other types of polynucleotides known in the art. For example, viral vectors can be used. Viral vectors may comprise virus-derived DNA or RNA sequences for packaging into a virus (e.g., a retrovirus, a replication defective retrovirus, an adenovirus, a replication defective adenovirus and an adeno-associated virus AAV). Viruses and viral vectors can be used for in vitro, ex vivo and/or in vivo delivery.

[0104] In another aspect, the present application provides a delivery vector, comprising the complex described in the present application and/or the nucleic acid described in the present application, and optionally a liposome and/or a lipid nanoparticle. For example, the delivery vector can be introduced into cells by a physical delivery method. Examples of physical methods include microinjection, electroporation, and hydrodynamic delivery. For example, LNPs can encapsulate nucleic acids in cationic lipid particles (e.g., liposomes), and can be delivered to cells relatively easily. In some examples, the lipid nanoparticles do not contain any viral components, which helps to minimize safety and immunogenicity issues. Lipid particles are useful for in vitro, ex vivo and in vivo delivery. Components of LNPs may include a cationic lipid, an ionizable lipid, a PEGylated lipid and/or a supporting lipid, and optionally a cholesterol component.

[0105] In another aspect, the present application provides a composition comprising the complex described in the present application, the nucleic acid described in the present application, and/or the delivery vector described in the present application. For example, the complex in the composition, the nucleic acid (or recombinant vector) encoding the complex and the delivery vector may be contained simultaneously in one composition, or separately in different compositions. For example, when the complex in the composition, the nucleic acid (or recombinant vector) encoding the complex, and/or the delivery vector are used, they can be used simultaneously, or they can be used separately.

[0106] In another aspect, the present application provides a cell comprising the complex described in the present application, the nucleic acid described in the present application, the delivery vector described in the present application, and/or the composition described in the present application.

[0107] In another aspect, the present application provides a kit comprising the complex described in the present application, the nucleic acid described in the present application, the delivery vector described in the present application, the composition described in the present application, and/or the cell described in the present application. For example, the kit further comprises at least one container for placing the above components. For example, the kit comprises more than one of the above components, and further comprises a second, third and/or other containers in addition to the container, into which the more than one of the above components can be separately placed. For example, the kit may place various combinations of the above components in the containers. For example, the kit further comprises a buffer reagent, a means for mixing, a means for measuring, a means for sorting and/or a means for labeling. For example, the kit further comprises a package for containing the various containers. For example, the kit further comprises instructions for using the kit components. For example, the instructions comprise a physical paper form and/or a machine-readable electronic form.

[0108] In another aspect, the present application provides a method for regulating target gene expression, comprising administering the complex described in the present application, the nucleic acid described in the present application, the delivery vector described in the present application, the composition described in the present application, the cell described in the present application, and/or the kit described in the present application. For example, the method for inhibiting target gene expression is to introduce the complex, the nucleic acid, the delivery vector, the composition, the cell and/or the kit into cells containing the target gene. For example, the introduction into cells can be carried out by non-viral or viral-based transfection methods. For example, the non-viral transfection methods include any suitable method for introducing into cells without using viral DNA or viral particles as a delivery system, and non-limiting examples of non-viral transfection methods include nanoparticle encapsulation of nucleic acids encoding the complex (e.g., lipid nanoparticles, gold nanoparticles, etc.), calcium phosphate transfection, liposome transfection, nucleofection, sonoporation, transfection by heat shock, magnetofection, and electroporation. For example, virus-based transfection methods include any viral vector suitable for use in the methods described in the present application, non-limiting examples of which include, but are not limited to, retroviral, adenoviral, lentiviral, and/or adeno-associated viral vectors. For example, the method for inhibiting target gene expression further comprises introducing the complex, the nucleic acid, the delivery vector, the composition, the cell and/or the kit into cells from the external environment. For another example, the method for inhibiting target gene expression comprises contacting the complex, the nucleic acid, the delivery vector, and/or the composition with a transcriptional regulatory element near and/or of the target gene. For example, the contacting means that the first fusion, the second fusion, and the guide RNA described in the present application are contacted with a transcriptional regulatory element near and/or of the target gene, and the guide RNA forms a complex with a fusion comprising the DNA binding domain, the complex specifically recognizes and hybridizes to a specific region in the target gene, while the first fusion and the second fusion are recruited to the vicinity of the DNA binding domain through direct or indirect interaction between their recruitment domain A and recruitment domain A′, thereby regulating the expression of the target nucleic acid. For example, the method comprises allowing the first fusion, the second fusion and the guide RNA described in the present application to exist in the form of a complex (e.g., an assembled ribonucleoprotein complex), and contacting the complex with a transcriptional regulatory element near and/or of the target gene.

[0109] In another aspect, the present application provides a method for treating or alleviating a disease or a disorder thereof associated with abnormal target gene expression and/or abnormal target gene activity, wherein the method comprises administering to a subject in need thereof an effective amount of the complex described in the present application, the nucleic acid described in the present application, the delivery vector described in the present application, the composition described in the present application, the cell described in the present application, and/or the kit described in the present application. For example, the treatment method comprises mixing the complex, the nucleic acid, the delivery vector, the composition, the cell and/or the kit with a therapeutic agent, and delivering it systemically to a subject in need thereof, so that it is extensively exposed to a substantial portion of the body, which can be carried out by any means known in the art, including, but not limited to, intravenous, intraarterial, subcutaneous, intracavitary, and intraperitoneal delivery. For example, the treatment method comprises mixing the complex, the nucleic acid, the delivery vector, the composition, the cell and/or the kit with a therapeutic agent, and delivering it locally to a subject in need thereof, so that it directly reaches the target site in the organism, which can be carried out by, for example, direct injection into the disease site (e.g., a tumor or inflammation site) or the target organ (e.g., liver, heart, pancreas, kidney, etc.). For example, the local delivery includes local administration or local injection techniques, including, but not limited to, intramuscular, subcutaneous, or intradermal injection. For example, the local delivery does not exclude systemic pharmacological effects. For example, the diseases include cardiovascular disease, non-alcoholic steatohepatitis, AMD, age-related macular degeneration, type 2 diabetes, obesity, liver failure, dislipidemia, diabetic atherosclerosis and/or hypertension.

[0110] In another aspect, the present application provides the use of the complex described in the present application, the nucleic acid described in the present application, the delivery vector described in the present application, the composition described in the present application, the cell described in the present application, and/or the kit described in the present application in the manufacture of a medicament for treating or alleviating a disease or a disorder thereof associated with abnormal target gene expression and/or abnormal target gene activity.

[0111] In another aspect, the present application provides the complex described in the present application, the nucleic acid described in the present application, the delivery vector described in the present application, the composition described in the present application, the cell described in the present application or the kit described in the present application, which is used for treating or alleviating a disease or a disorder thereof associated with abnormal target gene expression and/or abnormal target gene activity.

### First Fusion or Second Fusion

[0112] In some embodiments, the first fusion and the second fusion of the complex of the present application can be generally divided into two situations: (1) one of the two fusions comprises a nucleic acid binding domain, a DNA methylation domain and a recruitment domain A, and the other fusion comprises a transcriptional repressor domain and a recruitment domain A′, or (2) one of the two fusions comprises a nucleic acid binding domain, a transcriptional repressor domain and a recruitment domain A, and the other fusion comprises a DNA methylation domain and a recruitment domain A′.

[0113] Specifically, in some embodiments of the above-mentioned situation (1), one of the two fusions may comprise, in order from N-terminus to C-terminus, a DNA methylation domain, a nucleic acid binding domain and a recruitment domain A. For example, in some embodiments of the above-mentioned situation (2), one of the two fusions may comprise, from N-terminus to C-terminus, a recruitment domain A, a nucleic acid binding domain and a transcriptional repressor domain. For example, in some embodiments of the above-mentioned situation (1), the other of the two fusions may comprise, from N-terminus to C-terminus, a transcriptional repressor domain and a recruitment domain A′, or a recruitment domain A′ and a transcriptional repressor domain, that is, the transcriptional repressor domain and the recruitment domain A′ are linked in an interchangeable order. For example, in some embodiments of the above-mentioned situation (2), the other of the two fusions may comprise, from N-terminus to C-terminus, a DNA methylation domain and a recruitment domain A′, or a recruitment domain A′ and a DNA methylation domain, that is, the DNA methylation domain and the recruitment domain A′ are linked in an interchangeable order.

[0114] In some more specific embodiments, the nucleic acid binding domain is a DNA binding domain. For example, the DNA binding domain may be selected from: a TALE domain, a zinc finger domain, a tetR domain, a meganuclease, a Cas protein, an Argonaute (Ago) protein, and a homolog, a modified form or a variant thereof. For example, the DNA binding domain may be a Cas protein, and the Cas protein is a class II Cas nuclease. Further, the Cas protein may be selected from a class II type II Cas nuclease and a class II type V Cas nuclease; for example, the Cas protein may be a Cas9 or Cas12 protein. In certain embodiments, the Cas protein may be a dead Cas9 (dCas9) protein or a dead Cas12 (dCas12) protein. For example, the DNA binding domain described in the present application may comprise, but is not limited to, an amino acid sequence as set forth in any one of SEQ ID NOs: 1-9, 343 and 344.

[0115] In some more specific embodiments, the transcriptional repressor is selected from one or more of the following domains: KRAB, ZIM3, ZNF680, ZNF554, ZNF264, ZNF582, ZNF324, ZNF669, ZNF354A, ZNF82, ZNF595, ZNF419, ZNF566, ZIM2, EHMT2, SUV39H1, ZFPM1, TRIM28, EZH2, MXD1, SID, LSD1, HP1a, HDAC3, HDAC1, PRMT1, SETDB1, hSIRT1, ZNF436, ZNF257, ZNF675, ZNF490, ZNF320, ZNF331, ZNF816, ZNF41, ZNF189, ZNF528, ZNF543, ZNF140, ZNF610, ZNF350, ZNF8, ZNF30, ZNF98, ZNF677, ZNF596, ZNF214, ZNF37A, ZNF34, ZNF250, ZNF547, ZNF273, ZFP82, ZNF224, ZNF33A, ZNF45, ZNF175, ZNF184, ZFP28-1, ZFP28-2, ZNF18, ZNF213, ZNF394, ZFP1, ZFP14, ZNF416, ZNF557, ZNF729, ZNF254, ZNF764, ZNF785, ZNF10, CBX5, RYBP, YAF2, MGA, CBX1, SCMH1, MPP8, SUMO3, HERC2, BIN1, PCGF2, TOX, FOXA1, FOXA2, IRF2BP1, IRF2BP2, IRF2BPL IRF-2BP1_2 N-terminal domain, HOXA13, HOXB13, HOXC13, HOXA11, HOXC11, HOXC10, HOXA10, HOXB9, HOXA9, ZFP28, ZN334, ZN568, ZN37A, ZN181, ZN510, ZN862, ZN140, ZN208, ZN248, ZN571, ZN699, ZN726, ZIK1, ZNF2, Z705F, ZNF14, ZN471, ZN624, ZNF84, ZNF7, ZN891, ZN337, Z705G, ZN529, ZN729, ZN419, Z705A, ZN302, ZN486, ZN621, ZN688, ZN33A, ZN554, ZN878, ZN772, ZN224, ZN184, ZN544, ZNF57, ZN283, ZN549, ZN211, ZN615, ZN253, ZN226, ZN730, Z585A, ZN732, ZN681, ZN667, ZN649, ZN470, ZN484, ZN431, ZN382, ZN254, ZN124, ZN607, ZN317, ZN620, ZN141, ZN584, ZN540, ZN75D, ZN555, ZN658, ZN684, RBAK, ZN829, ZN582, ZN112, ZN716, HKR1, ZN350, ZN480, ZN416, ZNF92, ZN100, ZN736, ZNF74, ZN443, ZN195, ZN530, ZN782, ZN791, ZN331, Z354C, ZN157, ZN727, ZN550, ZN793, ZN235, ZN724, ZN573, ZN577, ZN789, ZN718, ZN300, ZN383, ZN429, ZN677, ZN850, ZN454, ZN257, ZN264, ZN485, ZN737, ZNF44, ZN596, ZN565, ZN543, ZFP69, SUMO1, ZNF12, ZN169, ZN433, ZN175, ZN347, ZNF25, ZN519, Z585B, ZN517, ZN846, ZN230, ZNF66, ZN713, ZN816, ZN426, ZN674, ZN627, ZNF20, Z587B, ZN316, ZN233, ZN611, ZN556, ZN234, ZN560, ZNF77, ZN682, ZN614, ZN785, ZN445, ZFP30, ZN225, ZN551, ZN610, ZN528, ZN284, ZN418, ZN490, ZN805, Z780B, ZN763, ZN285, ZNF85, ZN223, ZNF90, ZN557, ZN425, ZN229, ZN606, ZN155, ZN222, ZN442, ZNF91, ZN135, ZN778, ZN534, ZN586, ZN567, ZN440, ZN583, ZN441, ZNF43, ZN589, ZN563, ZN561, ZN136, ZN630, ZN527, ZN333, Z324B, ZN786, ZN709, ZN792, ZN599, ZN613, ZF69B, ZN799, ZN569, ZN564, ZN546, ZFP92, ZN723, ZN439, ZFP57, ZNF19, ZN404, ZN274, CBX3, ZN250, ZN570, ZN675, ZN695, ZN548, ZN132, ZN738, ZN420, ZN626, ZN559, ZN460, ZN268, ZN304, ZN605, ZN844, SUMO5, ZN101, ZN783, ZN417, ZN182, ZN823, ZN177, ZN197, ZN717, ZN669, ZN256, ZN251, CBX4, CDY2, CDYL2, ZN562, ZN461, Z324A, ZN766, ID2, ZN214, CBX7, ID1, CREM, SCX, ASCL1, ZN764, SCML2, TWST1, CREB1, TERF1, ID3, CBX8, GSX1, NKX22, ATF1, TWST2, ZNF17, TOX3, TOX4, ZMYM3, I2BP1, RHXF1, SSX2, I2BPL, ZN680, TRI68, HXA13, PHC3, TCF24, HXB13, HEY1, PHC2, ZNF81, FIGLA, SAM11, KMT2B, HEY2, JDP2, HXC13, ASCL4, HHEX, GSX2, ETV7, ASCL3, PHC1, OTP, I2BP2, VGLL2, HXA11, PDLI4, ASCL2, CDX4, ZN860, LMBL4, PDIP3, NKX25, CEBPB, ISL1, CDX2, PROP1, SIN3B, SMBT1, HXC11, HXC10, PRS6A, VSX1, NKX23, MTG16, HMX3, HMX1, KIF22, CSTF2, CEBPE, DLX2, PPARG, PRIC1, UNC4, BARX2, ALX3, TCF15, TERA, VSX2, HXD12, CDX1, TCF23, ALX1, HXA10, RX, CXXC5, SCML1, NFIL3, DLX6, MTG8, CEBPD, SEC13, FIP1, ALX4, LHX3, PRIC2, MAGI3, NELL1, PRRX1, MTG8R, RAX2, DLX3, DLX1, NKX26, NAB1, SAMD7, PITX3, WDR5, MEOX2, NAB2, DHX8, CBX6, EMX2, CPSF6, HXC12, KDM4B, LMBL3, PHX2A, EMX1, NC2B, DLX4, SRY, ZN777, ZN398, GATA3, BSH, SF3B4, TEAD1, TEAD3, RGAP1, PHF1, GATA2, FOXO3, ZN212, IRX4, ZBED6, LHX4, SIN3A, RBBP7, NKX61, R51A1, MB3L1, DLX5, NOTC1, TERF2, ZN282, RGS12, ZN840, SPI2B, PAX7, NKX62, ASXL2, FOXO1, GATA1, ZMYM5, LRP1, MIXL1, SGT1, LMCD1, CEBPA, SOX14, WTIP, PRP19, NKX11, RBBP4, DMRT2, SMCA2, and functionally active fragments thereof.

[0116] In some more specific embodiments, the DNA methylation domain comprises at least one DNA methyltransferase or a functionally active fragment thereof. For example, the DNA methyltransferase is selected from DNMT3A, DNMT3B, DNMT3c, DNMT1, DNMT2 and DNMT3L. For example, the DNA methylation domain comprises at least one DNMT3A and at least one DNMT3L. For example, the at least one DNMT3A and the at least one DNMT3L are linked in an interchangeable order. For example, the DNA methylation domain comprises one DNMT3A and one DNMT3L, and they are linked in an interchangeable order. For example, the DNA methyltransferase comprises an amino acid sequence as set forth in any one of SEQ ID NOs: 19-24.

[0117] The first fusion and the second fusion of the complex of the present application form an aggregated complex through the interaction between the recruitment domains they each comprise. Therefore, the present application provides non-limiting examples of combinations of recruitment domain A and recruitment domain A′: (1) the domain of one of the recruitment domain A and the recruitment domain A′ is a GCN4, and wherein the other domain is a scFv; or (2) the domain of one of the recruitment domain A and the recruitment domain A′ is a GFP11 fragment, and wherein the other domain is a GFP1-10; or (3) the domain of one of the recruitment domain A and the recruitment domain A′ is a GVKESLV, and wherein the other domain is a PDZ protein domain. Similarly, just as GFP11 and GFP1-10, which are respectively derived from split GFP (SEQ ID NO: 15), form the recruitment domain A and the recruitment domain A′, the same can be applied to other types of fluorescent proteins, such as mCherry (SEQ ID NO: 16), eYFP (SEQ ID NO: 18), eCFP (SEQ ID NO: 17), etc., that is, different groups of recruitment domain A and recruitment domain A′ can be obtained by split mCherry, split eYFP, or split eCFP for use in the complex provided in the present application. In some embodiments, one of the first fusion and the second fusion of the complex of the present application may comprise two or more recruitment domains, and they are linked by a linker sequence. The amino acid sequences of exemplary recruitment domains may comprise those as set forth in any one of SEQ ID NOs: 10-14.

[0118] In consideration of the aforementioned circumstances, the present application can provide the following amino acid sequences of the first fusion or the second fusion:

| | | Amino acid sequence (dCas or TALE: bold, DNMT: bold italics, |
|---|---|---|
| SEQ ID | Domain | transcriptional repressor: <underlined bold>; |
| NO: | Information | recruitment domain: underlined italics) |
| 51 | DNMT3A | MNHDQEFDPPKVYPPVPAEKRKPIRVLSLFDGIATGLLVLKDLGIQV |
| | (CD)- | DRYIASEVCEDSITVGMVRHQGKIMYVGDVRSVTQKHIQEWGPFDL |
| | DNMT3L | VIGGSPCNDLSIVNPARKGLYEGTGRLFFEFYRLLHDARPKEGDDRP |
| | (CD)- | FFWLFENVVAMGVSDKRDISRFLESNPVMIDAKEVSAAHRARYFWG |
| | dCas9- | NLPGMNRPLASTVNDKLELQECLEHGRIAKFSKVRTITTRSNSIKQG |
| | 10xGCN4 | KDQHFPVFMNEKEDILWCTEMERVFGFPVHYTDVSNMSRLARQRL |
| | | LGRSWSVPVIRHLFAPLKEYFACVSSGNSNANSRGPSFSSGLVPLSLR |
| | | GSHMGPMEIYKTVSAWKRQPVRVLSLFRNIDKVLKSLGFLESGSGSG |
| | | GGTLKYVEDVTNVVRRDVEKWGPFDLVYGSTQPLGSSCDRCPGWY |
| | | MFQFHRILQYALPRQESQRPFFWIFMDNLLLTEDDQETTTRFLQTE |
| | | AVTLQDVRGRDYQNAMRVWSNIPGLKSKHAPLTPKEEEYLQAQVRS |
| | | RSKLDAPKVDLLVKNCLLPLREYFKYFSQNSLPLGGPSSGAPPPSGGS |
| | | PAGSPTSTEEGTSESATPESGPGTSTEPSEGSAPGSPAGSPTSTEEGTST |
| | | EPSEGSAPGTSTEPSEPKKKRKVMDKKYSIGLAIGTNSVGWAVITD |
| | | EYKVPSKKFKVLGNTDRHSIKKNLIGALLFDSGETAEATRLKRTA |
| | | RRRYTRRKNRICYLQEIFSNEMAKVDDSFFHRLEESFLVEEDKKH |
| | | ERHPIFGNIVDEVAYHEKYPTIYHLRKKLVDSTDKADLRLIYLAL |
| | | AHMIKFRGHFLIEGDLNPDNSDVDKLFIQLVQTYNQLFEENPINA |
| | | SGVDAKAILSARLSKSRRLENLIAQLPGEKKNGLFGNLIALSLGL |
| | | TPNFKSNFDLAEDAKLQLSKDTYDDDLDNLLAQIGDQYADLFLA |
| | | AKNLSDAILLSDILRVNTEITKAPLSASMIKRYDEHHQDLTLLKAL |
| | | VRQQLPEKYKEIFFDQSKNGYAGYIDGGASQEEFYKFIKPILEKM |
| | | DGTEELLVKLNREDLLRKQRTFDNGSIPHQIHLGELHAILRRQED |
| | | FYPFLKDNREKIEKILTFRIPYYVGPLARGNSRFAWMTRKSEETI |
| | | TPWNFEEVVDKGASAQSFIERMTNFDKNLPNEKVLPKHSLLYEY |
| | | FTVYNELTKVKYVTEGMRKPAFLSGEQKKAIVDLLFKTNRKVTV |
| | | KQLKEDYFKKIECFDSVEISGVEDRFNASLGTYHDLLKIIKDKDF |
| | | LDNEENEDILEDIVLTLTLFEDREMIEERLKTYAHLFDDKVMKQL |
| | | KRRRYTGWGRLSRKLINGIRDKQSGKTILDFLKSDGFANRNFMQ |
| | | LIHDDSLTFKEDIQKAQVSGQGDSLHEHIANLAGSPAIKKGILQT |
| | | VKVVDELVKVMGRHKPENIVIEMARENQTTQKGQKNSRERMK |
| | | RIEEGIKELGSQILKEHPVENTQLQNEKLYLYYLQNGRDMYVDQ |
| | | ELDINRLSDYDVDAIVPQSFLKDDSIDNKVLTRSDKNRGKSDNVPS |
| | | EEVVKKMKNYWRQLLNAKLITQRKFDNLTKAERGGLSELDKAG |
| | | FIKRQLVETRQITKHVAQILDSRMNTKYDENDKLIREVKVITLKS |
| | | KLVSDFRKDFQFYKVREINNYHHAHDAYLNAVVGTALIKKYPKL |
| | | ESEFVYGDYKVYDVRKMIAKSEQEIGKATAKYFFYSNIMNFFKT |
| | | EITLANGEIRKRPLIETNGETGEIVWDKGRDFATVRKVLSMPQVN |
| | | IVKKTEVQTGGFSKESILPKRNSDKLIARKKDWDPKKYGGFDSPT |
| | | VAYSVLVVAKVEKGKSKKLKSVKELLGITIMERSSFEKNPIDFLE |
| | | AKGYKEVKKDLIIKLPKYSLFELENGRKRMLASAGELQKGNELA |
| | | LPSKYVNFLYLASHYEKLKGSPEDNEQKQLFVEQHKHYLDEIIEQ |
| | | ISEFSKRVILADANLDKVLSAYNKHRDKPIREQAENIIHLFTLTNL |
| | | GAPAAFKYFDTTIDRKRYTSTKEVLDATLIHQSITGLYETRIDLSQ |
| | | LGGDYPYDVPDYASLGSGSPKKKRKVEDPKKKRKVDGIGSGSNGSS |
| | | GEELLSKNYHLENEVARLKKGSGSGGSGSGGSGSGSGGSGSGGSGSGE |
| | | ELLSKNYHLENEVARLKKGSGSGGSGSGGSGSGSGGSGSGGSGSGEEL |
| | | LSKNYHLENEVARLKKGSGSGGSGSGGSGSGSGGSGSGGSGSGEELLS |
| | | KNYHLENEVARLKKGSGSGGSGSGGSGSGSGGSGSGGSGSGEELLSKN |
| | | YHLENEVARLKKGSGSGGSGSGGSGSGSGGSGSGGSGSGEELLSKNYH |
| | | LENEVARLKKGSGSGGSGSGGSGSGSGGSGSGGSGSGEELLSKNYHLE |
| | | NEVARLKKGSGSGGSGSGGSGSGSGGSGSGGSGSGEELLSKNYHLENE |
| | | VARLKKGSGSGGSGSGGSGSGSGGSGSGGSGSGEELLSKNYHLENEVA |
| | | RLKKGSGSGGSGSGGSGSGSGGSGSGGSGSGEELLSKNYHLENEVARL |
| | | KKGSGSGQRGSKRTADGSEFESPKKKRKV |
| 52 | scFv- | MGPDIVMTQSPSSLSASVGDRVTITCRSSTGAVTTSNYASWVQEKPGKLFK |
| | KRAB | GLIGGTNNRAPGVPSRFSGSLIGDKATLTISSLQPEDFATYFCALWYSNHW |
| | | VFGQGTKVELKRGGGGSGGGGSGGGGSSGGGSEVKLLESGGGLVQPG |
| | | GSLKLSCAVSGFSLTDYGVNWVRQAPGRGLEWIGVIWGDGITDYNSALK |
| | | DRFIISKDNGKNTVYLQMSKVRSDDTALYYCVTGLFDYWGQGTLVTVSSY |
| | | PYDVPDYAGGGGGSGGGGSGGGGSGGGGSSLDPGGGGSG<RTLVT |
| | | FKDVFVDFTREEWKLLDTAQQIVYRNVMLENYKNLVSLGYQLT |
| | | KPDVILRLEKGEEP>GSGKRTADGSEFESPKKKRKV |
| 53 | scFv- | MGPDIVMTQSPSSLSASVGDRVTITCRSSTGAVTTSNYASWVQEKPGKLFK |
| | Zim3 | GLIGGTNNRAPGVPSRFSGSLIGDKATLTISSLQPEDFATYFCALWYSNHW |
| | | VFGQGTKVELKRGGGGSGGGGSGGGGSSGGGSEVKLLESGGGLVQPG |
| | | GSLKLSCAVSGFSLTDYGVNWVRQAPGRGLEWIGVIWGDGITDYNSALK |
| | | DRFIISKDNGKNTVYLQMSKVRSDDTALYYCVTGLFDYWGQGTLVTVSSY |
| | | PYDVPDYAGGGGGSGGGGSGGGGSGGGGSSLDPGGGGSG<VTFED |
| | | VTVNFTQGEWQRLNPEQRNLYRDVMLENYSNLVSVGQGETTKP |
| | | DVILRLEQGKEPWL>GSGKRTADGSEFESPKKKRKV |
| 54 | scFv- | MGPDIVMTQSPSSLSASVGDRVTITCRSSTGAVTTSNYASWVQEKPGKLFK |
| | Znf680 | GLIGGTNNRAPGVPSRFSGSLIGDKATLTISSLQPEDFATYFCALWYSNHW |
| | | VFGQGTKVELKRGGGGSGGGGSGGGGSSGGGSEVKLLESGGGLVQPG |
| | | GSLKLSCAVSGFSLTDYGVNWVRQAPGRGLEWIGVIWGDGITDYNSALK |
| | | DRFIISKDNGKNTVYLQMSKVRSDDTALYYCVTGLFDYWGQGTLVTVSSY |
| | | PYDVPDYAGGGGGSGGGGSGGGGSGGGGSSLDPGGGGSG<LTFRD |
| | | VAIEFSLEEWQCLDTAQRNLYRKVMFENYRNLVFLGIAVSKPHLI |
| | | TCLEQGKEPWN>GSGKRTADGSEFESPKKKRKV |
| 55 | scFv- | MGPDIVMTQSPSSLSASVGDRVTITCRSSTGAVTTSNYASWVQEKPGKLFK |
| | Znf554 | GLIGGTNNRAPGVPSRFSGSLIGDKATLTISSLQPEDFATYFCALWYSNHW |
| | | VFGQGTKVELKRGGGGSGGGGSGGGGSSGGGSEVKLLESGGGLVQPG |
| | | GSLKLSCAVSGFSLTDYGVNWVRQAPGRGLEWIGVIWGDGITDYNSALK |
| | | DRFIISKDNGKNTVYLQMSKVRSDDTALYYCVTGLFDYWGQGTLVTVSSY |
| | | PYDVPDYAGGGGGSGGGGSGGGGSGGGGSSLDPGGGGSG<VTFED |
| | | VSMDFSQEEWELLEPAQKNLYREVMLENYRNVVSLEALKNQCT |
| | | DVGIKEGPLSPAQT>GSGKRTADGSEFESPKKKRKV |
| 56 | scFv- | MGPDIVMTQSPSSLSASVGDRVTITCRSSTGAVTTSNYASWVQEKPGKLFK |
| | Znf264 | GLIGGTNNRAPGVPSRFSGSLIGDKATLTISSLQPEDFATYFCALWYSNHW |
| | | VFGQGTKVELKRGGGGSGGGGSGGGGSSGGGSEVKLLESGGGLVQPG |
| | | GSLKLSCAVSGFSLTDYGVNWVRQAPGRGLEWIGVIWGDGITDYNSALK |
| | | DRFIISKDNGKNTVYLQMSKVRSDDTALYYCVTGLFDYWGQGTLVTVSSY |
| | | PYDVPDYAGGGGGSGGGGSGGGGSGGGGSSLDPGGGGSG<VTFDD |
| | | VAVTFTKEEWGQLDLAQRTLYQEVMLENCGLLVSLGCPVPKAE |
| | | LICHLEHGQEPWT>GSGKRTADGSEFESPKKKRKV |
| 57 | scFv- | MGPDIVMTQSPSSLSASVGDRVTITCRSSTGAVTTSNYASWVQEKPGKLFK |
| | Znf582 | GLIGGTNNRAPGVPSRFSGSLIGDKATLTISSLQPEDFATYFCALWYSNHW |
| | | VFGQGTKVELKRGGGGSGGGGSGGGGSSGGGSEVKLLESGGGLVQPG |
| | | GSLKLSCAVSGFSLTDYGVNWVRQAPGRGLEWIGVIWGDGITDYNSALK |
| | | DRFIISKDNGKNTVYLQMSKVRSDDTALYYCVTGLFDYWGQGTLVTVSSY |
| | | PYDVPDYAGGGGGSGGGGSGGGGSGGGGSSLDPGGGGSG<ELFRD |
| | | VAIVFSQEEWQWLAPAQRDLYRDVMLETYSNLVSLGLAVSKPDV |
| | | ISFLEQGKEPWM>GSGKRTADGSEFESPKKKRKV |
| 58 | scFv- | MGPDIVMTQSPSSLSASVGDRVTITCRSSTGAVTTSNYASWVQEKPGKLFK |
| | Znf324 | GLIGGTNNRAPGVPSRFSGSLIGDKATLTISSLQPEDFATYFCALWYSNHW |
| | | VFGQGTKVELKRGGGGSGGGGSGGGGSSGGGSEVKLLESGGGLVQPG |
| | | GSLKLSCAVSGFSLTDYGVNWVRQAPGRGLEWIGVIWGDGITDYNSALK |
| | | DRFIISKDNGKNTVYLQMSKVRSDDTALYYCVTGLFDYWGQGTLVTVSSY |
| | | PYDVPDYAGGGGGSGGGGSGGGGSGGGGSSLDPGGGGSG<MAFED |
| | | VAVYFSQEEWGLLDTAQRALYRRVMLDNFALVASLGLSTSRPRV |
| | | VIQLERGEEPWV>GSGKRTADGSEFESPKKKRKV |
| 59 | scFv- | MGPDIVMTQSPSSLSASVGDRVTITCRSSTGAVTTSNYASWVQEKPGKLFK |
| | Znf669 | GLIGGTNNRAPGVPSRFSGSLIGDKATLTISSLQPEDFATYFCALWYSNHW |
| | | VFGQGTKVELKRGGGGSGGGGSGGGGSSGGGSEVKLLESGGGLVQPG |
| | | GSLKLSCAVSGFSLTDYGVNWVRQAPGRGLEWIGVIWGDGITDYNSALK |
| | | DRFIISKDNGKNTVYLQMSKVRSDDTALYYCVTGLFDYWGQGTLVTVSSY |
| | | PYDVPDYAGGGGGSGGGGSGGGGSGGGGSSLDPGGGGSG<VAFED |
| | | VAVNFTQEEWALLDSSQKNLYREVMQETCRNLASVGSQWKDQN |
| | | IEDHFEKPGKDIRN>GSGKRTADGSEFESPKKKRKV |
| 60 | scFv- | MGPDIVMTQSPSSLSASVGDRVTITCRSSTGAVTTSNYASWVQEKPGKLFK |
| | Znf354a | GLIGGTNNRAPGVPSRFSGSLIGDKATLTISSLQPEDFATYFCALWYSNHW |
| | | VFGQGTKVELKRGGGGSGGGGSGGGGSSGGGSEVKLLESGGGLVQPG |
| | | GSLKLSCAVSGFSLTDYGVNWVRQAPGRGLEWIGVIWGDGITDYNSALK |
| | | DRFIISKDNGKNTVYLQMSKVRSDDTALYYCVTGLFDYWGQGTLVTVSSY |
| | | PYDVPDYAGGGGGSGGGGSGGGGSGGGGSSLDPGGGGSG<LTFED |
| | | VAVLFTRDEWRKLAPSQRNLYRDVMLENYRNLVSLGLPFTKPK |
| | | VISLLQQGEDPWE>GSGKRTADGSEFESPKKKRKV |
| 61 | scFv- | MGPDIVMTQSPSSLSASVGDRVTITCRSSTGAVTTSNYASWVQEKPGKLFK |
| | Znf82 | GLIGGTNNRAPGVPSRFSGSLIGDKATLTISSLQPEDFATYFCALWYSNHW |
| | | VFGQGTKVELKRGGGGSGGGGSGGGGSSGGGSEVKLLESGGGLVQPG |
| | | GSLKLSCAVSGFSLTDYGVNWVRQAPGRGLEWIGVIWGDGITDYNSALK |
| | | DRFIISKDNGKNTVYLQMSKVRSDDTALYYCVTGLFDYWGQGTLVTVSSY |
| | | PYDVPDYAGGGGGSGGGGSGGGGSGGGGSSLDPGGGGSG<VMFSD |
| | | VSIDESPEEWEYLDLEQKDLYRDVMLENYSNLVSLGCFISKPDVIS |
| | | SLEQGKEPWK>GSGKRTADGSEFESPKKKRKV |
| 62 | scFv- | MGPDIVMTQSPSSLSASVGDRVTITCRSSTGAVTTSNYASWVQEKPGKLFK |
| | Znf595 | GLIGGTNNRAPGVPSRFSGSLIGDKATLTISSLQPEDFATYFCALWYSNHW |
| | | VFGQGTKVELKRGGGGSGGGGSGGGGSSGGGSEVKLLESGGGLVQPG |
| | | GSLKLSCAVSGFSLTDYGVNWVRQAPGRGLEWIGVIWGDGITDYNSALK |
| | | DRFIISKDNGKNTVYLQMSKVRSDDTALYYCVTGLFDYWGQGTLVTVSSY |
| | | PYDVPDYAGGGGGSGGGGSGGGGSGGGGSSLDPGGGGSG<VTFRD |
| | | VAIEFSPEEWKCLDPAQQNLYRDVMLENYRNLVSLGFVISNPDLV |
| | | TCLEQIKEPCN>GSGKRTADGSEFESPKKKRKV |
| 63 | scFv- | MGPDIVMTQSPSSLSASVGDRVTITCRSSTGAVTTSNYASWVQEKPGKLFK |
| | Znf419 | GLIGGTNNRAPGVPSRFSGSLIGDKATLTISSLQPEDFATYFCALWYSNHW |
| | | VFGQGTKVELKRGGGGSGGGGSGGGGSSGGGSEVKLLESGGGLVQPG |
| | | GSLKLSCAVSGFSLTDYGVNWVRQAPGRGLEWIGVIWGDGITDYNSALK |
| | | DRFIISKDNGKNTVYLQMSKVRSDDTALYYCVTGLFDYWGQGTLVTVSSY |
| | | PYDVPDYAGGGGGSGGGGSGGGGSGGGGSSLDPGGGGSG<VTFED |
| | | VAVYFSQEEWRLLDDAQRLLYRNVMLENFTLLASLGLASSKTHE |
| | | ITQLESWEEPFM>GSGKRTADGSEFESPKKKRKV |
| 64 | scFv- | MGPDIVMTQSPSSLSASVGDRVTITCRSSTGAVTTSNYASWVQEKPGKLFK |
| | Znf566 | GLIGGTNNRAPGVPSRFSGSLIGDKATLTISSLQPEDFATYFCALWYSNHW |
| | | VFGQGTKVELKRGGGGSGGGGSGGGGSSGGGSEVKLLESGGGLVQPG |
| | | GSLKLSCAVSGFSLTDYGVNWVRQAPGRGLEWIGVIWGDGITDYNSALK |
| | | DRFIISKDNGKNTVYLQMSKVRSDDTALYYCVTGLFDYWGQGTLVTVSSY |
| | | PYDVPDYAGGGGGSGGGGSGGGGSGGGGSSLDPGGGGSG<VMFSD |
| | | VSVDFSQEEWECLNDDQRDLYRDVMLENYSNLVSMGHSISKPNV |
| | | ISYLEQGKEPWL>GSGKRTADGSEFESPKKKRKV |
| 65 | scFv- | MGPDIVMTQSPSSLSASVGDRVTITCRSSTGAVTTSNYASWVQEKPGKLFK |
| | Zim2 | GLIGGTNNRAPGVPSRFSGSLIGDKATLTISSLQPEDFATYFCALWYSNHW |
| | | VFGQGTKVELKRGGGGSGGGGSGGGGSSGGGSEVKLLESGGGLVQPG |
| | | GSLKLSCAVSGFSLTDYGVNWVRQAPGRGLEWIGVIWGDGITDYNSALK |
| | | DRFIISKDNGKNTVYLQMSKVRSDDTALYYCVTGLFDYWGQGTLVTVSSY |
| | | PYDVPDYAGGGGGSGGGGSGGGGSGGGGSSLDPGGGGSG<VTFED |
| | | VLVDFSPEELSSLSAAQRNLYREVMLENYRNLVSLGHQFSKPDIIS |
| | | RLEEEESYAM>GSGKRTADGSEFESPKKKRKV |
| 66 | scFv- | MGPDIVMTQSPSSLSASVGDRVTITCRSSTGAVTTSNYASWVQEKPGKLFK |
| | EHMT2 | GLIGGTNNRAPGVPSRFSGSLIGDKATLTISSLQPEDFATYFCALWYSNHW |
| | (G9A) | VFGQGTKVELKRGGGGSGGGGSGGGGSSGGGSEVKLLESGGGLVQPG |
| | | GSLKLSCAVSGFSLTDYGVNWVRQAPGRGLEWIGVIWGDGITDYNSALK |
| | | DRFIISKDNGKNTVYLQMSKVRSDDTALYYCVTGLFDYWGQGTLVTVSSY |
| | | PYDVPDYAGGGGGSGGGGSGGGGSGGGGSSLDPGGGGSG<TGSAAI |
| | | AEVLLNARCDLHAVNYHGDTPLHIAARESYHDCVLLFLSRGANP |
| | | ELRNKEGDTAWDLTPERSDVWFALQLNRKLRLGVGNRAIRTEKI |
| | | ICRDVARGYENVPIPCVNGVDGEPCPEDYKYISENCETSTMNIDR |
| | | NITHLQHCTCVDDCSSSNCLCGQLSIRCWYDKDGRLLQEFNKIEP |
| | | PLIFECNQACSCWRNCKNRVVQSGIKVRLQLYRTAKMGWGVRA |
| | | LQTIPQGTFICEYVGELISDAEADVREDDSYLFDLDNKDGEVYCID |
| | | ARYYGNISRFINHLCDPNIIPVRVFMLHQDLRFPRIAFFSSRDIRTG |
| | | EELGFDYGDRFWDIKSKYFTCQCGSEKCKHSAEAIALEQSRLAR |
| | | LDPHPELLPELGSLPPVNT>GSGKRTADGSEFESPKKKRKV |
| 67 | scFv- | MGPDIVMTQSPSSLSASVGDRVTITCRSSTGAVTTSNYASWVQEKPGKLFK |
| | SUV39 | GLIGGTNNRAPGVPSRFSGSLIGDKATLTISSLQPEDFATYFCALWYSNHW |
| | H1 | VFGQGTKVELKRGGGGSGGGGSGGGGSSGGGSEVKLLESGGGLVQPG |
| | | GSLKLSCAVSGFSLTDYGVNWVRQAPGRGLEWIGVIWGDGITDYNSALK |
| | | DRFIISKDNGKNTVYLQMSKVRSDDTALYYCVTGLFDYWGQGTLVTVSSY |
| | | PYDVPDYAGGGGGSGGGGSGGGGSGGGGSSLDPGGGGSG<AENLK |
| | | GCSVCCKSSWNQLQDLCRLAKLSCPALGISKRNLYDFEVEYLCD |
| | | YKKIREQEYYLVKWRGYPDSESTWEPRQNLKCVRILKQFHKDL |
| | | ERELLRRHHRSKTPRHLDPSLANYLVQKAKQRRALRRWEQELN |
| | | AKRSHLGRITVENEVDLDGPPRAFVYINEYRVGEGITLNQVAVGC |
| | | ECQDCLWAPTGGCCPGASLHKFAYNDQGQVRLRAGLPIYECNS |
| | | RCRCGYDCPNRVVQKGIRYDLCIFRTDDGRGWGVRTLEKIRKNS |
| | | FVMEYVGEIITSEEAERRGQIYDRQGATYLFDLDYVEDVYTVDA |
| | | AYYGNISHFVNHSCDPNLQVYNVFIDNLDERLPRIAFFATRTIRAG |
| | | EELTFDYNMQVDPVDMESTRMDSNFGLAGLPGSPKKRVRIECKC |
| | | GTESCRKYLF>GSGKRTADGSEFESPKKKRKV |
| 68 | scFv- | MGPDIVMTQSPSSLSASVGDRVTITCRSSTGAVTTSNYASWVQEKPGKLFK |
| | ZFPM1 | GLIGGTNNRAPGVPSRFSGSLIGDKATLTISSLQPEDFATYFCALWYSNHW |
| | (FOG) | VFGQGTKVELKRGGGGSGGGGSGGGGSSGGGSEVKLLESGGGLVQPG |
| | | GSLKLSCAVSGFSLTDYGVNWVRQAPGRGLEWIGVIWGDGITDYNSALK |
| | | DRFIISKDNGKNTVYLQMSKVRSDDTALYYCVTGLFDYWGQGTLVTVSSY |
| | | PYDVPDYAGGGGGSGGGGSGGGGSGGGGSSLDPGGGGSG<SRRKQ |
| | | SNPRQIKRSLGDMEAREEVQLVGASHMEQKATAPEAPSPPSA |
| | | >GSGKRTADGSEFESPKKKRKV |
| 69 | scFv- | MGPDIVMTQSPSSLSASVGDRVTITCRSSTGAVTTSNYASWVQEKPGKLFK |
| | TRIM28 | GLIGGTNNRAPGVPSRFSGSLIGDKATLTISSLQPEDFATYFCALWYSNHW |
| | (KAP1) | VFGQGTKVELKRGGGGSGGGGSGGGGSSGGGSEVKLLESGGGLVQPG |
| | | GSLKLSCAVSGFSLTDYGVNWVRQAPGRGLEWIGVIWGDGITDYNSALK |
| | | DRFIISKDNGKNTVYLQMSKVRSDDTALYYCVTGLFDYWGQGTLVTVSSY |
| | | PYDVPDYAGGGGGSGGGGSGGGGSGGGGSSLDPGGGGSG<AASAA |
| | | AASAAAASAASGSPGPGEGSAGGEKRSTAPSAAASASASAAASSP |
| | | AGGGAEALELLEHCGVCRERLRPEREPRLLPCLHSACSACLGPA |
| | | APAAANSSGDGGAAGDGTVVDCPVCKQQCFSKDIVENYFMRDS |
| | | GSKAATDAQDANQCCTSCEDNAPATSYCVECSEPLCETCVEAHQ |
| | | RVKYTKDHTVRSTGPAKSRDGERTVYCNVHKHEPLVLFCESCDT |
| | | LTCRDCQLNAHKDHQYQFLEDAVRNQRKLLASLVKRLGDKHAT |
| | | LQKSTKEVRSSIRQVSDVQKRVQVDVKMAILQIMKELNKRGRVL |
| | | VNDAQKVTEGQQERLERQHWTMTKIQKHQEHILRFASWALESD |
| | | NNTALLLSKKLIYFQLHRALKMIVDPVEPHGEMKFQWDLNAWT |
| | | KSAEAFGKIVAERPGTNSTGPAPMAPPRAPGPLSKQGSGSSQPME |
| | | VQEGYGFGSGDDPYSSAEPHVSGVKRSRSGEGEVSGLMRKVPRV |
| | | SLERLDLDLTADSQPPVFKVFPGSTTEDYNLIVIERGAAAAATGQ |
| | | PGTAPAGTPGAPPLAGMAIVKEEETEAAIGAPPTATEGPETKPVL |
| | | MALAEGPGAEGPRLASPSGSTSSGLEVVAPEGTSAPGGGPGTLD |
| | | DSATICRVCQKPGDLVMCNQCEFCFHLDCHLPALQDVPGEEWS |
| | | CSLCHVLPDLKEEDGSLSLDGADSTGVVAKLSPANQRKCERVLL |
| | | ALFCHEPCRPLHQLATDSTFSLDQPGGTLDLTLIRARLQEKLSPP |
| | | YSSPQEFAQDVGRMFKQFNKLTEDKADVQSIIGLQRFFETRMNE |
| | | AFGDTKFSAVLVEPPPMSLPGAGLSSQELSGGPGDGP>GSGKRTA |
| | | DGSEFESPKKKRKV |
| 70 | scFv- | MGPDIVMTQSPSSLSASVGDRVTITCRSSTGAVTTSNYASWVQEKPGKLFK |
| | EZH2 | GLIGGTNNRAPGVPSRFSGSLIGDKATLTISSLQPEDFATYFCALWYSNHW |
| | | VFGQGTKVELKRGGGGSGGGGSGGGGSSGGGSEVKLLESGGGLVQPG |
| | | GSLKLSCAVSGFSLTDYGVNWVRQAPGRGLEWIGVIWGDGITDYNSALK |
| | | DRFIISKDNGKNTVYLQMSKVRSDDTALYYCVTGLFDYWGQGTLVTVSSY |
| | | PYDVPDYAGGGGGSGGGGSGGGGSGGGGSSLDPGGGGSG<GQTGK |
| | | KSEKGPVCWRKRVKSEYMRLRQLKRFRRADEVKSMFSSNRQKI |
| | | LERTEILNQEWKQRRIQPVHILTSVSSLRGTRECSVTSDLDFPTQV |
| | | IPLKTLNAVASVPIMYSWSPLQQNFMVEDETVLHNIPYMGDEVL |
| | | DQDGTFIEELIKNYDGKVHGDRECGFINDEIFVELVNALGQYNDD |
| | | DDDDDGDDPEEREEKQKDLEDHRDDKESRPPRKFPSDKIFEAISS |
| | | MFPDKGTAEELKEKYKELTEQQLPGALPPECTPNIDGPNAKSVQ |
| | | REQSLHSFHTLFCRRCFKYDCFLHPFHATPNTYKRKNTETALDN |
| | | KPCGPQCYQHLEGAKEFAAALTAERIKTPPKRPGGRRRGRLPNN |
| | | SSRPSTPTINVLESKDTDSDREAGTETGGENNDKEEEEKKDETSSS |
| | | SEANSRCQTPIKMKPNIEPPENVEWSGAEASMFRVLIGTYYDNFC |
| | | AIARLIGTKTCRQVYEFRVKESSIIAPAPAEDVDTPPRKKKRKHR |
| | | LWAAHCRKIQLKKDGSSNHVYNYQPCDHPRQPCDSSCPCVIAQN |
| | | FCEKFCQCSSECQNRFPGCRCKAQCNTKQCPCYLAVRECDPDLC |
| | | LTCGAADHWDSKNVSCKNCSIQRGSKKHLLLAPSDVAGWGIFIK |
| | | DPVQKNEFISEYCGEIISQDEADRRGKVYDKYMCSFLFNLNNDFV |
| | | VDATRKGNKIRFANHSVNPNCYAKVMMVNGDHRIGIFAKRAIQT |
| | | GEELFFDYRYSQADALKYVGIEREMEIP>GSGKRTADGSEFESPKK |
| | | KRKV |
| 71 | scFv- | MGPDIVMTQSPSSLSASVGDRVTITCRSSTGAVTTSNYASWVQEKPGKLFK |
| | MXD1 | GLIGGTNNRAPGVPSRFSGSLIGDKATLTISSLQPEDFATYFCALWYSNHW |
| | (SIDFL) | VFGQGTKVELKRGGGGSGGGGSGGGGSSGGGSEVKLLESGGGLVQPG |
| | | GSLKLSCAVSGFSLTDYGVNWVRQAPGRGLEWIGVIWGDGITDYNSALK |
| | | DRFIISKDNGKNTVYLQMSKVRSDDTALYYCVTGLFDYWGQGTLVTVSSY |
| | | PYDVPDYAGGGGGSGGGGSGGGGSGGGGSSLDPGGGGSG<AAAVR |
| | | MNIQMLLEAADYLERREREAEHGYASMLPYNNKDRDALKRRNK |
| | | SKKNNSSSRSTHNEMEKNRRAHLRLCLEKLKGLVPLGPESSRHT |
| | | TLSLLTKAKLHIKKLEDCDRKAVHQIDQLQREQRHLKRQLEKL |
| | | GIERIRMDSIGSTVSSERSDSDREIDVDVESTDYLTGDLDWSSSSVS |
| | | DSDERGSMQSLGSDEGYSSTSIKRIKLQDSHKACLGL>GSGKRTA |
| | | DGSEFESPKKKRKV |
| 72 | scFv- | MGPDIVMTQSPSSLSASVGDRVTITCRSSTGAVTTSNYASWVQEKPGKLFK |
| | SID | GLIGGTNNRAPGVPSRFSGSLIGDKATLTISSLQPEDFATYFCALWYSNHW |
| | | VFGQGTKVELKRGGGGSGGGGSGGGGSSGGGSEVKLLESGGGLVQPG |
| | | GSLKLSCAVSGFSLTDYGVNWVRQAPGRGLEWIGVIWGDGITDYNSALK |
| | | DRFIISKDNGKNTVYLQMSKVRSDDTALYYCVTGLFDYWGQGTLVTVSSY |
| | | PYDVPDYAGGGGGSGGGGSGGGGSGGGGSSLDPGGGGSG<MNIQM |
| | | LLEAADYLERREREAEHGYASMLP |
| | | >GSGKRTADGSEFESPKKKRKV |
| 73 | scFv- | MGPDIVMTQSPSSLSASVGDRVTITCRSSTGAVTTSNYASWVQEKPGKLFK |
| | LSD1 | GLIGGINNRAPGVPSRFSGSLIGDKATLTISSLQPEDFATYFCALWYSNHW |
| | (KDMA1) | VFGQGTKVELKRGGGGSGGGGSGGGGSSGGGSEVKLLESGGGLVQPG |
| | | GSLKLSCAVSGFSLTDYGVNWVRQAPGRGLEWIGVIWGDGITDYNSALK |
| | | DRFIISKDNGKNTVYLQMSKVRSDDTALYYCVTGLFDYWGQGTLVTVSSY |
| | | PYDVPDYAGGGGGSGGGGSGGGGSGGGGSSLDPGGGGSG<LSGKK |
| | | AAAAAAAAAAAATGTEAGPGTAGGSENGSEVAAQPAGLSGPAE |
| | | VGPGAVGERTPRKKEPPRASPPGGLAEPPGSAGPQAGPTVVPGS |
| | | ATPMETGIAETPEGRRTSRRKRAKVEYREMDESLANLSEDEYYS |
| | | EEERNAKAEKEKKLPPPPPQAPPEEENESEPEEPSGQAGGLQDDS |
| | | SGGYGDGQASGVEGAAFQSRLPHDRMTSQEAACFPDIISGPQQT |
| | | QKVFLFIRNRTLQLWLDNPKIQLTFEATLQQLEAPYNSDTVLVH |
| | | RVHSYLERHGLINFGIYKRIKPLPTKKTGKVIIIGSGVSGLAAARQ |
| | | LQSFGMDVTLLEARDRVGGRVATFRKGNYVADLGAMVVTGLG |
| | | GNPMAVVSKQVNMELAKIKQKCPLYEANGQADTVKVPKEKDE |
| | | MVEQEFNRLLEATSYLSHQLDENVLNNKPVSLGQALEVVIQLQE |
| | | KHVKDEQIEHWKKIVKTQEELKELLNKMVNLKEKIKELHQQYK |
| | | EASEVKPPRDITAEFLVKSKHRDLTALCKEYDELAETQGKLEEK |
| | | LQELEANPPSDVYLSSRDRQILDWHFANLEFANATPLSTLSLKHW |
| | | DQDDDFEFTGSHLTVRNGYSCVPVALAEGLDIKLNTAVRQVRYT |
| | | ASGCEVIAVNTRSTSQTFIYKCDAVLCTLPLGVLKQQPPAVQFVP |
| | | PLPEWKTSAVQRMGFGNLNKVVLCFDRVFWDPSVNLFGHVGST |
| | | TASRGELFLFWNLYKAPILLALVAGEAAGIMENISDDVIVGRCLA |
| | | ILKGIFGSSAVPQPKETVVSRWRADPWARGSYSYVAAGSSGNDY |
| | | DLMAQPITPGPSIPGAPQPIPRLFFAGEHTIRNYPATVHGALLSGL |
| | | REAGRIADQFLGAMYTLPRQATPGVPAQQSPSM>GSGKRTADGS |
| | | EFESPKKKRKV |
| 74 | scFv- | MGPDIVMTQSPSSLSASVGDRVTITCRSSTGAVTTSNYASWVQEKPGKLFK |
| | HP1a | GLIGGTNNRAPGVPSRFSGSLIGDKATLTISSLQPEDFATYFCALWYSNHW |
| | long | VFGQGTKVELKRGGGGSGGGGSGGGGSSGGGSEVKLLESGGGLVQPG |
| | | GSLKLSCAVSGFSLTDYGVNWVRQAPGRGLEWIGVIWGDGITDYNSALK |
| | | DRFIISKDNGKNTVYLQMSKVRSDDTALYYCVTGLFDYWGQGTLVTVSSY |
| | | PYDVPDYAGGGGGSGGGGSGGGGSGGGGSSLDPGGGGSG<GKKTK |
| | | RTADSSSSEDEEEYVVEKVLDRRVVKGQVEYLLKWKGFSEEHNT |
| | | WEPEKNLDCPELISEFMKKYKKMKEGENNKPREKSESNKRKSN |
| | | FSNSADDIKSKKKREQSNDIARGFERGLEPEKIIGATDSCGDLMFL |
| | | MKWKDTDEADLVLAKEANVKCPQIVIAFYEERLTWHAYPEDAE |
| | | NKEKETAKS>GSGKRTADGSEFESPKKKRKV |
| 75 | scFv- | MGPDIVMTQSPSSLSASVGDRVTITCRSSTGAVTTSNYASWVQEKPGKLFK |
| | HP1a | GLIGGTNNRAPGVPSRFSGSLIGDKATLTISSLQPEDFATYFCALWYSNHW |
| | short | VFGQGTKVELKRGGGGSGGGGSGGGGSSGGGSEVKLLESGGGLVQPG |
| | | GSLKLSCAVSGFSLTDYGVNWVRQAPGRGLEWIGVIWGDGITDYNSALK |
| | | DRFIISKDNGKNTVYLQMSKVRSDDTALYYCVTGLFDYWGQGTLVTVSSY |
| | | PYDVPDYAGGGGGSGGGGSGGGGSGGGGSSLDPGGGGSG<MKEGE |
| | | NNKPREKSESNKRKSNFSNSADDIKSKKKREQSNDIARGFERGLE |
| | | PEKIIGATDSCGDLMFLMKWKDTDEADLVLAKEANVKCPQIVIA |
| | | FYEERLTWHAYPEDAENKEKETAKS |
| | | >GSGKRTADGSEFESPKKKRKV |
| 76 | scFv- | MGPDIVMTQSPSSLSASVGDRVTITCRSSTGAVTTSNYASWVQEKPGKLFK |
| | HDAC3 | GLIGGTNNRAPGVPSRFSGSLIGDKATLTISSLQPEDFATYFCALWYSNHW |
| | | VFGQGTKVELKRGGGGSGGGGSGGGGSSGGGSEVKLLESGGGLVQPG |
| | | GSLKLSCAVSGFSLTDYGVNWVRQAPGRGLEWIGVIWGDGITDYNSALK |
| | | DRFIISKDNGKNTVYLQMSKVRSDDTALYYCVTGLFDYWGQGTLVTVSSY |
| | | PYDVPDYAGGGGGSGGGGSGGGGSGGGGSSLDPGGGGSG<AKTVA |
| | | YFYDPDVGNFHYGAGHPMKPHRLALTHSLVLHYGLYKKMIVFK |
| | | PYQASQHDMCRFHSEDYIDFLQRVSPTNMQGFTKSLNAFNVGDD |
| | | CPVFPGLFEFCSRYTGASLQGATQLNNKICDIAINWAGGLHHAK |
| | | KFEASGFCYVNDIVIGILELLKYHPRVLYIDIDIHHGDGVQEAFYL |
| | | TDRVMTVSFHKYGNYFFPGTGDMYEVGAESGRYYCLNVPLRDG |
| | | IDDQSYKHLFQPVINQVVDFYQPTCIVLQCGADSLGCDRLGCFNL |
| | | SIRGHGECVEYVKSFNIPLLVLGGGGYTVRNVARCWTYETSLLV |
| | | EEAISEELPYSEYFEYFAPDFTLHPDVSTRIENQNSRQYLDQIRQTI |
| | | FENLKMLNHAPSVQIHDVPADLLTYDRTDEADAEERGPEENYSR |
| | | PEAPNEFYDGDHDNDKESDVEI>GSGKRTADGSEFESPKKKRKV |
| 77 | 3xGCN4- | MPAAKRVKLDGSEELLSKNYHLENEVARLKKGSGSGGSGSGGSGSGS |
| | dCas9- | GGSGSGGSGSGEELLSKNYHLENEVARLKKGSGSGGSGSGGSGSGSGG |
| | 3xGCN4 | SGSGGSGSGEELLSKNYHLENEVARLKKGSGSGGSGSGGSGSGSGGSG |
| | | SGGSGSGPKKKRKVMDKKYSIGLAIGTNSVGWAVITDEYKVPSKK |
| | | FKVLGNTDRHSIKKNLIGALLFDSGETAEATRLKRTARRRYTRR |
| | | KNRICYLQEIFSNEMAKVDDSFFHRLEESFLVEEDKKHERHPIFG |
| | | NIVDEVAYHEKYPTIYHLRKKLVDSTDKADLRLIYLALAHMIKFR |
| | | GHFLIEGDLNPDNSDVDKLFIQLVQTYNQLFEENPINASGVDAKA |
| | | ILSARLSKSRRLENLIAQLPGEKKNGLFGNLIALSLGLTPNFKSNF |
| | | DLAEDAKLQLSKDTYDDDLDNLLAQIGDQYADLFLAAKNLSDAI |
| | | LLSDILRVNTEITKAPLSASMIKRYDEHHQDLTLLKALVRQQLPE |
| | | KYKEIFFDQSKNGYAGYIDGGASQEEFYKFIKPILEKMDGTEELL |
| | | VKLNREDLLRKQRTFDNGSIPHQIHLGELHAILRRQEDFYPFLKD |
| | | NREKIEKILTFRIPYYVGPLARGNSRFAWMTRKSEETITPWNFEE |
| | | VVDKGASAQSFIERMTNFDKNLPNEKVLPKHSLLYEYFTVYNEL |
| | | TKVKYVTEGMRKPAFLSGEQKKAIVDLLFKTNRKVTVKQLKED |
| | | YFKKIECFDSVEISGVEDRFNASLGTYHDLLKIIKDKDFLDNEENE |
| | | DILEDIVLTLTLFEDREMIEERLKTYAHLFDDKVMKQLKRRRYT |
| | | GWGRLSRKLINGIRDKQSGKTILDFLKSDGFANRNFMQLIHDDSL |
| | | TFKEDIQKAQVSGQGDSLHEHIANLAGSPAIKKGILQTVKVVDEL |
| | | VKVMGRHKPENIVIEMARENQTTQKGQKNSRERMKRIEEGIKE |
| | | LGSQILKEHPVENTQLQNEKLYLYYLQNGRDMYVDQELDINRLS |
| | | DYDVDAIVPQSFLKDDSIDNKVLTRSDKNRGKSDNVPSEEVVKK |
| | | MKNYWRQLLNAKLITQRKFDNLTKAERGGLSELDKAGFIKRQL |
| | | VETRQITKHVAQILDSRMNTKYDENDKLIREVKVITLKSKLVSDF |
| | | RKDFQFYKVREINNYHHAHDAYLNAVVGTALIKKYPKLESEFVY |
| | | GDYKVYDVRKMIAKSEQEIGKATAKYFFYSNIMNFFKTEITLAN |
| | | GEIRKRPLIETNGETGEIVWDKGRDFATVRKVLSMPQVNIVKKT |
| | | EVQTGGFSKESILPKRNSDKLIARKKDWDPKKYGGFDSPTVAYS |
| | | VLVVAKVEKGKSKKLKSVKELLGITIMERSSFEKNPIDFLEAKGY |
| | | KEVKKDLIIKLPKYSLFELENGRKRMLASAGELQKGNELALPSK |
| | | YVNFLYLASHYEKLKGSPEDNEQKQLFVEQHKHYLDEIIEQISEF |
| | | SKRVILADANLDKVLSAYNKHRDKPIREQAENIIHLFTLTNLGAP |
| | | AAFKYFDTTIDRKRYTSTKEVLDATLIHQSITGLYETRIDLSQLGG |
| | | DAYPYDVPDYASLGSGSPKKKRKVEDPKKKRKVDGSGSETPGTSGG |
| | | SGSGSGGSGSGGSGSGEELLSKNYHLENEVARLKKGSGSGGSGSGGSG |
| | | SGSGGSGSGGSGSGEELLSKNYHLENEVARLKKGSGSGGSGSGGSGSG |
| | | SGGSGSGGSGSGEELLSKNYHLENEVARLKKGSGSGQRGSKRTADGSE |
| | | FESPKKKRKV* |
| 78 | scFv- | MPAAKRVKLDGSGPDIVMTQSPSSLSASVGDRVTITCRSSTGAVTTSNYA |
| | KRAB | SWVQEKPGKLFKGLIGGTNNRAPGVPSRFSGSLIGDKATLTISSLQPEDF |
| | | ATYFCALWYSNHWVFGQGTKVELKRGGGGSGGGGSGGGGSSGGGSEV |
| | | KLLESGGGLVQPGGSLKLSCAVSGFSLTDYGVNWVRQAPGRGLEWIGVI |
| | | WGDGITDYNSALKDRFIISKDNGKNTVYLQMSKVRSDDTALYYCVTGLFD |
| | | YWGQGTLVTVSSYPYDVPDYAGGGGGSGGGGSGGGGSGGGGSLDPG |
| | | GGGSG<RTLVTFKDVFVDFTREEWKLLDTAQQIVYRNVMLENYK |
| | | NLVSLGYQLTKPDVILRLEKGEEP>* |
| 79 | DNMMT3A- | MPAAKRVKLDGSNHDQEFDPPKVYPPVPAEKRKPIRVLSLFDGIATG |
| | DNMT3L- | LLVLKDLGIQVDRYIASEVCEDSITVGMVRHQGKIMYVGDVRSVTQK |
| | dCas9- | HIQEWGPFDLVIGGSPCNDLSIVNPARKGLYEGTGRLFFEFYRLLHD |
| | 1xGCN4 | ARPKEGDDRPFFWLFENVVAMGVSDKRDISRFLESNPVMIDAKEVS |
| | | AAHRARYFWGNLPGMNRPLASTVNDKLELQECLEHGRIAKFSKVRT |
| | | ITTRSNSIKQGKDQHFPVFMNEKEDILWCTEMERVFGFPVHYTDVS |
| | | NMSRLARQRLLGRSWSVPVIRHLFAPLKEYFACVSSGNSNANSRGPS |
| | | FSSGLVPLSLRGSHMGPMEIYKTVSAWKRQPVRVLSLFRNIDKVLKSL |
| | | GFLESGSGSGGGTLKYVEDVTNVVRRDVEKWGPFDLVYGSTQPLGS |
| | | SCDRCPGWYMFQFHRILQYALPRQESQRPFFWIFMDNLLLTEDDQE |
| | | TTTRFLQTEAVTLQDVRGRDYQNAMRVWSNIPGLKSKHAPLTPKEE |
| | | EYLQAQVRSRSKLDAPKVDLLVKNCLLPLREYFKYFSQNSLPLGGPSS |
| | | GAPPPSGGSPAGSPTSTEEGTSESATPESGPGTSTEPSEGSAPGSPAGSP |
| | | TSTEEGTSTEPSEGSAPGTSTEPSEPKKKRKVMDKKYSIGLAIGTNSV |
| | | GWAVITDEYKVPSKKFKVLGNTDRHSIKKNLIGALLFDSGETAE |
| | | ATRLKRTARRRYTRRKNRICYLQEIFSNEMAKVDDSFFHRLEESF |
| | | LVEEDKKHERHPIFGNIVDEVAYHEKYPTIYHLRKKLVDSTDKA |
| | | DLRLIYLALAHMIKFRGHFLIEGDLNPDNSDVDKLFIQLVQTYNQ |
| | | LFEENPINASGVDAKAILSARLSKSRRLENLIAQLPGEKKNGLFG |
| | | NLIALSLGLTPNFKSNFDLAEDAKLQLSKDTYDDDLDNLLAQIGD |
| | | QYADLFLAAKNLSDAILLSDILRVNTEITKAPLSASMIKRYDEHH |
| | | QDLTLLKALVRQQLPEKYKEIFFDQSKNGYAGYIDGGASQEEFY |
| | | KFIKPILEKMDGTEELLVKLNREDLLRKQRTFDNGSIPHQIHLGE |
| | | LHAILRRQEDFYPFLKDNREKIEKILTFRIPYYVGPLARGNSRFA |
| | | WMTRKSEETITPWNFEEVVDKGASAQSFIERMTNFDKNLPNEKV |
| | | LPKHSLLYEYFTVYNELTKVKYVTEGMRKPAFLSGEQKKAIVDL |
| | | LFKTNRKVTVKQLKEDYFKKIECFDSVEISGVEDRFNASLGTYHD |
| | | LLKIIKDKDFLDNEENEDILEDIVLTLTLFEDREMIEERLKTYAHL |
| | | FDDKVMKQLKRRRYTGWGRLSRKLINGIRDKQSGKTILDFLKSD |
| | | GFANRNFMQLIHDDSLTFKEDIQKAQVSGQGDSLHEHIANLAGSP |
| | | AIKKGILQTVKVVDELVKVMGRHKPENIVIEMARENQTTQKGQ |
| | | KNSRERMKRIEEGIKELGSQILKEHPVENTQLQNEKLYLYYLQN |
| | | GRDMYVDQELDINRLSDYDVDAIVPQSFLKDDSIDNKVLTRSDKN |
| | | RGKSDNVPSEEVVKKMKNYWRQLLNAKLITQRKFDNLTKAERG |
| | | GLSELDKAGFIKRQLVETRQITKHVAQILDSRMNTKYDENDKLIR |
| | | EVKVITLKSKLVSDFRKDFQFYKVREINNYHHAHDAYLNAVVGT |
| | | ALIKKYPKLESEFVYGDYKVYDVRKMIAKSEQEIGKATAKYFFY |
| | | SNIMNFFKTEITLANGEIRKRPLIETNGETGEIVWDKGRDFATVR |
| | | KVLSMPQVNIVKKTEVQTGGFSKESILPKRNSDKLIARKKDWDP |
| | | KKYGGFDSPTVAYSVLVVAKVEKGKSKKLKSVKELLGITIMERS |
| | | SFEKNPIDFLEAKGYKEVKKDLIIKLPKYSLFELENGRKRMLASA |
| | | GELQKGNELALPSKYVNFLYLASHYEKLKGSPEDNEQKQLFVEQ |
| | | HKHYLDEIIEQISEFSKRVILADANLDKVLSAYNKHRDKPIREQAE |
| | | NIIHLFTLTNLGAPAAFKYFDTTIDRKRYTSTKEVLDATLIHQSIT |
| | | GLYETRIDLSQLGGDAYPYDVPDYASLGSGSPKKKRKVEDPKKKR |
| | | KVDGIGSGSNGSSGEELLSKNYHLENEVARLKKGSGSGGSGSGGSGSG |
| | | SGGSGSGGSGSGEELLSKNYHGSGSGQRGSKRTADGSEFESPKKKRK |
| | | V* |
| 80 | DNMT3A- | MPAAKRVKLDGSNHDQEFDPPKVYPPVPAEKRKPIRVLSLFDGIATG |
| | DNMT3L- | LLVLKDLGIQVDRYIASEVCEDSITVGMVRHQGKIMYVGDVRSVTQK |
| | dCas9- | HIQEWGPFDLVIGGSPCNDLSIVNPARKGLYEGTGRLFFEFYRLLHD |
| | 2xGCN4 | ARPKEGDDRPFFWLFENVVAMGVSDKRDISRFLESNPVMIDAKEVS |
| | | AAHRARYFWGNLPGMNRPLASTVNDKLELQECLEHGRIAKFSKVRT |
| | | ITTRSNSIKQGKDQHFPVFMNEKEDILWCTEMERVFGFPVHYTDVS |
| | | NMSRLARQRLLGRSWSVPVIRHLFAPLKEYFACVSSGNSNANSRGPS |
| | | FSSGLVPLSLRGSHMGPMEIYKTVSAWKRQPVRVLSLFRNIDKVLKSL |
| | | GFLESGSGSGGGTLKYVEDVTNVVRRDVEKWGPFDLVYGSTQPLGS |
| | | SCDRCPGWYMFQFHRILQYALPRQESQRPFFWIFMDNLLLTEDDQE |
| | | TTTRFLQTEAVTLQDVRGRDYQNAMRVWSNIPGLKSKHAPLTPKEE |
| | | EYLQAQVRSRSKLDAPKVDLLVKNCLLPLREYFKYFSQNSLPLGGPSS |
| | | GAPPPSGGSPAGSPTSTEEGTSESATPESGPGTSTEPSEGSAPGSPAGSP |
| | | TSTEEGTSTEPSEGSAPGTSTEPSEPKKKRKVMDKKYSIGLAIGTNSV |
| | | GWAVITDEYKVPSKKFKVLGNTDRHSIKKNLIGALLFDSGETAE |
| | | ATRLKRTARRRYTRRKNRICYLQEIFSNEMAKVDDSFFHRLEESF |
| | | LVEEDKKHERHPIFGNIVDEVAYHEKYPTIYHLRKKLVDSTDKA |
| | | DLRLIYLALAHMIKFRGHFLIEGDLNPDNSDVDKLFIQLVQTYNQ |
| | | LFEENPINASGVDAKAILSARLSKSRRLENLIAQLPGEKKNGLFG |
| | | NLIALSLGLTPNFKSNFDLAEDAKLQLSKDTYDDDLDNLLAQIGD |
| | | QYADLFLAAKNLSDAILLSDILRVNTEITKAPLSASMIKRYDEHH |
| | | QDLTLLKALVRQQLPEKYKEIFFDQSKNGYAGYIDGGASQEEFY |
| | | KFIKPILEKMDGTEELLVKLNREDLLRKQRTFDNGSIPHQIHLGE |
| | | LHAILRRQEDFYPFLKDNREKIEKILTFRIPYYVGPLARGNSRFA |
| | | WMTRKSEETITPWNFEEVVDKGASAQSFIERMTNFDKNLPNEKV |
| | | LPKHSLLYEYFTVYNELTKVKYVTEGMRKPAFLSGEQKKAIVDL |
| | | LFKTNRKVTVKQLKEDYFKKIECFDSVEISGVEDRFNASLGTYHD |
| | | LLKIIKDKDFLDNEENEDILEDIVLTLTLFEDREMIEERLKTYAHL |
| | | FDDKVMKQLKRRRYTGWGRLSRKLINGIRDKQSGKTILDFLKSD |
| | | GFANRNFMQLIHDDSLTFKEDIQKAQVSGQGDSLHEHIANLAGSP |
| | | AIKKGILQTVKVVDELVKVMGRHKPENIVIEMARENQTTQKGQ |
| | | KNSRERMKRIEEGIKELGSQILKEHPVENTQLQNEKLYLYYLQN |
| | | GRDMYVDQELDINRLSDYDVDAIVPQSFLKDDSIDNKVLTRSDKN |
| | | RGKSDNVPSEEVVKKMKNYWRQLLNAKLITQRKFDNLTKAERG |
| | | GLSELDKAGFIKRQLVETRQITKHVAQILDSRMNTKYDENDKLIR |
| | | EVKVITLKSKLVSDFRKDFQFYKVREINNYHHAHDAYLNAVVGT |
| | | ALIKKYPKLESEFVYGDYKVYDVRKMIAKSEQEIGKATAKYFFY |
| | | SNIMNFFKTEITLANGEIRKRPLIETNGETGEIVWDKGRDFATVR |
| | | KVLSMPQVNIVKKTEVQTGGFSKESILPKRNSDKLIARKKDWDP |
| | | KKYGGFDSPTVAYSVLVVAKVEKGKSKKLKSVKELLGITIMERS |
| | | SFEKNPIDFLEAKGYKEVKKDLIIKLPKYSLFELENGRKRMLASA |
| | | GELQKGNELALPSKYVNFLYLASHYEKLKGSPEDNEQKQLFVEQ |
| | | HKHYLDEIIEQISEFSKRVILADANLDKVLSAYNKHRDKPIREQAE |
| | | NIIHLFTLTNLGAPAAFKYFDTTIDRKRYTSTKEVLDATLIHQSIT |
| | | GLYETRIDLSQLGGDAYPYDVPDYASLGSGSPKKKRKVEDPKKKR |
| | | KVDGIGSGSNGSSGEELLSKNYHLENEVARLKKGSGSGGSGSGGSGSG |
| | | SGGSGSGGSGSGEELLSKNYHLENEVARLKKGSGSGQRGSKRTADGSE |
| | | FESPKKKRKV* |
| 81 | DNMT3A- | MPAAKRVKLDGSNHDQEFDPPKVYPPVPAEKRKPIRVLSLFDGIATG |
| | DNMT3L- | LLVLKDLGIQVDRYIASEVCEDSITVGMVRHQGKIMYVGDVRSVTQK |
| | dCas9- | HIQEWGPFDLVIGGSPCNDLSIVNPARKGLYEGTGRLFFEFYRLLHD |
| | 4xGCN4 | ARPKEGDDRPFFWLFENVVAMGVSDKRDISRFLESNPVMIDAKEVS |
| | | AAHRARYFWGNLPGMNRPLASTVNDKLELQECLEHGRIAKFSKVRT |
| | | ITTRSNSIKQGKDQHFPVFMNEKEDILWCTEMERVFGFPVHYTDVS |
| | | NMSRLARQRLLGRSWSVPVIRHLFAPLKEYFACVSSGNSNANSRGPS |
| | | FSSGLVPLSLRGSHMGPMEIYKTVSAWKRQPVRVLSLFRNIDKVLKSL |
| | | GFLESGSGSGGGTLKYVEDVTNVVRRDVEKWGPFDLVYGSTQPLGS |
| | | SCDRCPGWYMFQFHRILQYALPRQESQRPFFWIFMDNLLLTEDDQE |
| | | TTTRFLQTEAVTLQDVRGRDYQNAMRVWSNIPGLKSKHAPLTPKEE |
| | | EYLQAQVRSRSKLDAPKVDLLVKNCLLPLREYFKYFSQNSLPLGGPSS |
| | | GAPPPSGGSPAGSPTSTEEGTSESATPESGPGTSTEPSEGSAPGSPAGSP |
| | | TSTEEGTSTEPSEGSAPGTSTEPSEPKKKRKVMDKKYSIGLAIGTNSV |
| | | GWAVITDEYKVPSKKFKVLGNTDRHSIKKNLIGALLFDSGETAE |
| | | ATRLKRTARRRYTRRKNRICYLQEIFSNEMAKVDDSFFHRLEESF |
| | | LVEEDKKHERHPIFGNIVDEVAYHEKYPTIYHLRKKLVDSTDKA |
| | | DLRLIYLALAHMIKFRGHFLIEGDLNPDNSDVDKLFIQLVQTYNQ |
| | | LFEENPINASGVDAKAILSARLSKSRRLENLIAQLPGEKKNGLFG |
| | | NLIALSLGLTPNFKSNFDLAEDAKLQLSKDTYDDDLDNLLAQIGD |
| | | QYADLFLAAKNLSDAILLSDILRVNTEITKAPLSASMIKRYDEHH |
| | | QDLTLLKALVRQQLPEKYKEIFFDQSKNGYAGYIDGGASQEEFY |
| | | KFIKPILEKMDGTEELLVKLNREDLLRKQRTFDNGSIPHQIHLGE |
| | | LHAILRRQEDFYPFLKDNREKIEKILTFRIPYYVGPLARGNSRFA |
| | | WMTRKSEETITPWNFEEVVDKGASAQSFIERMTNFDKNLPNEKV |
| | | LPKHSLLYEYFTVYNELTKVKYVTEGMRKPAFLSGEQKKAIVDL |
| | | LFKTNRKVTVKQLKEDYFKKIECFDSVEISGVEDRFNASLGTYHD |
| | | LLKIIKDKDFLDNEENEDILEDIVLTLTLFEDREMIEERLKTYAHL |
| | | FDDKVMKQLKRRRYTGWGRLSRKLINGIRDKQSGKTILDFLKSD |
| | | GFANRNFMQLIHDDSLTFKEDIQKAQVSGQGDSLHEHIANLAGSP |
| | | AIKKGILQTVKVVDELVKVMGRHKPENIVIEMARENQTTQKGQ |
| | | KNSRERMKRIEEGIKELGSQILKEHPVENTQLQNEKLYLYYLQN |
| | | GRDMYVDQELDINRLSDYDVDAIVPQSFLKDDSIDNKVLTRSDKN |
| | | RGKSDNVPSEEVVKKMKNYWRQLLNAKLITQRKFDNLTKAERG |
| | | GLSELDKAGFIKRQLVETRQITKHVAQILDSRMNTKYDENDKLIR |
| | | EVKVITLKSKLVSDFRKDFQFYKVREINNYHHAHDAYLNAVVGT |
| | | ALIKKYPKLESEFVYGDYKVYDVRKMIAKSEQEIGKATAKYFFY |
| | | SNIMNFFKTEITLANGEIRKRPLIETNGETGEIVWDKGRDFATVR |
| | | KVLSMPQVNIVKKTEVQTGGFSKESILPKRNSDKLIARKKDWDP |
| | | KKYGGFDSPTVAYSVLVVAKVEKGKSKKLKSVKELLGITIMERS |
| | | SFEKNPIDFLEAKGYKEVKKDLIIKLPKYSLFELENGRKRMLASA |
| | | GELQKGNELALPSKYVNFLYLASHYEKLKGSPEDNEQKQLFVEQ |
| | | HKHYLDEIIEQISEFSKRVILADANLDKVLSAYNKHRDKPIREQAE |
| | | NIIHLFTLTNLGAPAAFKYFDTTIDRKRYTSTKEVLDATLIHQSIT |
| | | GLYETRIDLSQLGGDAYPYDVPDYASLGSGSPKKKRKVEDPKKKR |
| | | KVDGIGSGSNGSSGEELLSKNYHLENEVARLKKGSGSGGSGSGGSGSG |
| | | SGGSGSGGSGSGEELLSKNYHLENEVARLKKGSGSGGSGSGGSGSGSG |
| | | GSGSGGSGSGEELLSKNYHLENEVARLKKGSGSGGSGSGGSGSGSGGS |
| | | GSGGSGSGEELLSKNYHLENEVARLKKGSGSGQRGSKRTADGSEFESP |
| | | KKKRKV* |
| 82 | DNMT3A- | MPAAKRVKLDGSNHDQEFDPPKVYPPVPAEKRKPIRVLSLFDGIATG |
| | DNMT3L- | LLVLKDLGIQVDRYIASEVCEDSITVGMVRHQGKIMYVGDVRSVTQK |
| | dCas9- | HIQEWGPFDLVIGGSPCNDLSIVNPARKGLYEGTGRLFFEFYRLLHD |
| | 10xGCN4 | ARPKEGDDRPFFWLFENVVAMGVSDKRDISRFLESNPVMIDAKEVS |
| | | AAHRARYFWGNLPGMNRPLASTVNDKLELQECLEHGRIAKFSKVRT |
| | | ITTRSNSIKQGKDQHFPVFMNEKEDILWCTEMERVFGFPVHYTDVS |
| | | NMSRLARQRLLGRSWSVPVIRHLFAPLKEYFACVSSGNSNANSRGPS |
| | | FSSGLVPLSLRGSHMGPMEIYKTVSAWKRQPVRVLSLFRNIDKVLKSL |
| | | GFLESGSGSGGGTLKYVEDVTNVVRRDVEKWGPFDLVYGSTQPLGS |
| | | SCDRCPGWYMFQFHRILQYALPRQESQRPFFWIFMDNLLLTEDDQE |
| | | TTTRFLQTEAVTLQDVRGRDYQNAMRVWSNIPGLKSKHAPLTPKEE |
| | | EYLQAQVRSRSKLDAPKVDLLVKNCLLPLREYFKYFSQNSLPLGGPSS |
| | | GAPPPSGGSPAGSPTSTEEGTSESATPESGPGTSTEPSEGSAPGSPAGSP |
| | | TSTEEGTSTEPSEGSAPGTSTEPSEPKKKRKVMDKKYSIGLAIGTNSV |
| | | GWAVITDEYKVPSKKFKVLGNTDRHSIKKNLIGALLFDSGETAE |
| | | ATRLKRTARRRYTRRKNRICYLQEIFSNEMAKVDDSFFHRLEESF |
| | | LVEEDKKHERHPIFGNIVDEVAYHEKYPTIYHLRKKLVDSTDKA |
| | | DLRLIYLALAHMIKFRGHFLIEGDLNPDNSDVDKLFIQLVQTYNQ |
| | | LFEENPINASGVDAKAILSARLSKSRRLENLIAQLPGEKKNGLFG |
| | | NLIALSLGLTPNFKSNFDLAEDAKLQLSKDTYDDDLDNLLAQIGD |
| | | QYADLFLAAKNLSDAILLSDILRVNTEITKAPLSASMIKRYDEHH |
| | | QDLTLLKALVRQQLPEKYKEIFFDQSKNGYAGYIDGGASQEEFY |
| | | KFIKPILEKMDGTEELLVKLNREDLLRKQRTFDNGSIPHQIHLGE |
| | | LHAILRRQEDFYPFLKDNREKIEKILTFRIPYYVGPLARGNSRFA |
| | | WMTRKSEETITPWNFEEVVDKGASAQSFIERMTNFDKNLPNEKV |
| | | LPKHSLLYEYFTVYNELTKVKYVTEGMRKPAFLSGEQKKAIVDL |
| | | LFKTNRKVTVKQLKEDYFKKIECFDSVEISGVEDRFNASLGTYHD |
| | | LLKIIKDKDFLDNEENEDILEDIVLTLTLFEDREMIEERLKTYAHL |
| | | FDDKVMKQLKRRRYTGWGRLSRKLINGIRDKQSGKTILDFLKSD |
| | | GFANRNFMQLIHDDSLTFKEDIQKAQVSGQGDSLHEHIANLAGSP |
| | | AIKKGILQTVKVVDELVKVMGRHKPENIVIEMARENQTTQKGQ |
| | | KNSRERMKRIEEGIKELGSQILKEHPVENTQLQNEKLYLYYLQN |
| | | GRDMYVDQELDINRLSDYDVDAIVPQSFLKDDSIDNKVLTRSDKN |
| | | RGKSDNVPSEEVVKKMKNYWRQLLNAKLITQRKFDNLTKAERG |
| | | GLSELDKAGFIKRQLVETRQITKHVAQILDSRMNTKYDENDKLIR |
| | | EVKVITLKSKLVSDFRKDFQFYKVREINNYHHAHDAYLNAVVGT |
| | | ALIKKYPKLESEFVYGDYKVYDVRKMIAKSEQEIGKATAKYFFY |
| | | SNIMNFFKTEITLANGEIRKRPLIETNGETGEIVWDKGRDFATVR |
| | | KVLSMPQVNIVKKTEVQTGGFSKESILPKRNSDKLIARKKDWDP |
| | | KKYGGFDSPTVAYSVLVVAKVEKGKSKKLKSVKELLGITIMERS |
| | | SFEKNPIDFLEAKGYKEVKKDLIIKLPKYSLFELENGRKRMLASA |
| | | GELQKGNELALPSKYVNFLYLASHYEKLKGSPEDNEQKQLFVEQ |
| | | HKHYLDEIIEQISEFSKRVILADANLDKVLSAYNKHRDKPIREQAE |
| | | NIIHLFTLTNLGAPAAFKYFDTTIDRKRYTSTKEVLDATLIHQSIT |
| | | GLYETRIDLSQLGGDAYPYDVPDYASLGSGSPKKKRKVEDPKKKR |
| | | KVDGIGSGSNGSSGEELLSKNYHLENEVARLKKGSGSGGSGSGGSGSG |
| | | SGGSGSGGSGSGEELLSKNYHLENEVARLKKGSGSGGSGSGGSGSGSG |
| | | GSGSGGSGSGEELLSKNYHLENEVARLKKGSGSGGSGSGGSGSGSGGS |
| | | GSGGSGSGEELLSKNYHLENEVARLKKGSGSGGSGSGGSGSGSGGSGS |
| | | GGSGSGEELLSKNYHLENEVARLKKGSGSGGSGSGGSGSGSGGSGSGG |
| | | SGSGEELLSKNYHLENEVARLKKGSGSGGSGSGGSGSGSGGSGSGGSG |
| | | SGEELLSKNYHLENEVARLKKGSGSGGSGSGGSGSGSGGSGSGGSGSG |
| | | EELLSKNYHLENEVARLKKGSGSGGSGSGGSGSGSGGSGSGGSGSGEE |
| | | LLSKNYHLENEVARLKKGSGSGGSGSGGSGSGSGGSGSGGSGSGEELLS |
| | | KNYHLENEVARLKKGSGSGQRGSKRTADGSEFESPKKKRKV* |
| 83 | DNMT3A- | MPAAKRVKLDGSNHDQEFDPPKVYPPVPAEKRKPIRVLSLFDGIATG |
| | DNMT3L- | LLVLKDLGIQVDRYIASEVCEDSITVGMVRHQGKIMYVGDVRSVTQK |
| | scFV | HIQEWGPFDLVIGGSPCNDLSIVNPARKGLYEGTGRLFFEFYRLLHD |
| | | ARPKEGDDRPFFWLFENVVAMGVSDKRDISRFLESNPVMIDAKEVS |
| | | AAHRARYFWGNLPGMNRPLASTVNDKLELQECLEHGRIAKFSKVRT |
| | | ITTRSNSIKQGKDQHFPVFMNEKEDILWCTEMERVFGFPVHYTDVS |
| | | NMSRLARQRLLGRSWSVPVIRHLFAPLKEYFACVSSGNSNANSRGPS |
| | | FSSGLVPLSLRGSHMGPMEIYKTVSAWKRQPVRVLSLFRNIDKVLKSL |
| | | GFLESGSGSGGGTLKYVEDVTNVVRRDVEKWGPFDLVYGSTQPLGS |
| | | SCDRCPGWYMFQFHRILQYALPRQESQRPFFWIFMDNLLLTEDDQE |
| | | TTTRFLQTEAVTLQDVRGRDYQNAMRVWSNIPGLKSKHAPLTPKEE |
| | | EYLQAQVRSRSKLDAPKVDLLVKNCLLPLREYFKYFSQNSLPLGGPSS |
| | | GAPPPSGGSPAGSPTSTEEGTSESATPESGPGTSTEPSEGSAPGSPAGSP |
| | | TSTEEGTSTEPSEGSAPGTSTEPSEGPDIVMTQSPSSLSASVGDRVTITCR |
| | | SSTGAVTTSNYASWVQEKPGKLFKGLIGGTNNRAPGVPSRFSGSLIGDKA |
| | | TLTISSLQPEDFATYFCALWYSNHWVFGQGTKVELKRGGGGSGGGGSG |
| | | GGGSSGGGSEVKLLESGGGLVQPGGSLKLSCAVSGFSLTDYGVNWVRQA |
| | | PGRGLEWIGVIWGDGITDYNSALKDRFIISKDNGKNTVYLQMSKVRSDDT |
| | | ALYYCVTGLFDYWGQGTLVTVSSYPYDVPDYAGGGGGSGGGGSGGGG |
| | | SGGGGS* |
| 84 | 3xGCN4- | MPAAKRVKLDGSEELLSKNYHLENEVARLKKGSGSGGSGSGGSGSGS |
| | dCas9- | GGSGSGGSGSGEELLSKNYHLENEVARLKKGSGSGGSGSGGSGSGSGG |
| | KRAB | SGSGGSGSGEELLSKNYHLENEVARLKKGSGSGGSGSGGSGSGSGGSG |
| | | SGGSGSGPKKKRKVMDKKYSIGLAIGTNSVGWAVITDEYKVPSKK |
| | | FKVLGNTDRHSIKKNLIGALLFDSGETAEATRLKRTARRRYTRR |
| | | KNRICYLQEIFSNEMAKVDDSFFHRLEESFLVEEDKKHERHPIFG |
| | | NIVDEVAYHEKYPTIYHLRKKLVDSTDKADLRLIYLALAHMIKFR |
| | | GHFLIEGDLNPDNSDVDKLFIQLVQTYNQLFEENPINASGVDAKA |
| | | ILSARLSKSRRLENLIAQLPGEKKNGLFGNLIALSLGLTPNFKSNF |
| | | DLAEDAKLQLSKDTYDDDLDNLLAQIGDQYADLFLAAKNLSDAI |
| | | LLSDILRVNTEITKAPLSASMIKRYDEHHQDLTLLKALVRQQLPE |
| | | KYKEIFFDQSKNGYAGYIDGGASQEEFYKFIKPILEKMDGTEELL |
| | | VKLNREDLLRKQRTFDNGSIPHQIHLGELHAILRRQEDFYPFLKD |
| | | NREKIEKILTFRIPYYVGPLARGNSRFAWMTRKSEETITPWNFEE |
| | | VVDKGASAQSFIERMTNFDKNLPNEKVLPKHSLLYEYFTVYNEL |
| | | TKVKYVTEGMRKPAFLSGEQKKAIVDLLFKTNRKVTVKQLKED |
| | | YFKKIECFDSVEISGVEDRFNASLGTYHDLLKIIKDKDFLDNEENE |
| | | DILEDIVLTLTLFEDREMIEERLKTYAHLEDDKVMKQLKRRRYT |
| | | GWGRLSRKLINGIRDKQSGKTILDFLKSDGFANRNFMQLIHDDSL |
| | | TFKEDIQKAQVSGQGDSLHEHIANLAGSPAIKKGILQTVKVVDEL |
| | | VKVMGRHKPENIVIEMARENQTTQKGQKNSRERMKRIEEGIKE |
| | | LGSQILKEHPVENTQLQNEKLYLYYLQNGRDMYVDQELDINRLS |
| | | DYDVDAIVPQSFLKDDSIDNKVLTRSDKNRGKSDNVPSEEVVKK |
| | | MKNYWRQLLNAKLITQRKFDNLTKAERGGLSELDKAGFIKRQL |
| | | VETRQITKHVAQILDSRMNTKYDENDKLIREVKVITLKSKLVSDF |
| | | RKDFQFYKVREINNYHHAHDAYLNAVVGTALIKKYPKLESEFVY |
| | | GDYKVYDVRKMIAKSEQEIGKATAKYFFYSNIMNFFKTEITLAN |
| | | GEIRKRPLIETNGETGEIVWDKGRDFATVRKVLSMPQVNIVKKT |
| | | EVQTGGFSKESILPKRNSDKLIARKKDWDPKKYGGFDSPTVAYS |
| | | VLVVAKVEKGKSKKLKSVKELLGITIMERSSFEKNPIDFLEAKGY |
| | | KEVKKDLIIKLPKYSLFELENGRKRMLASAGELQKGNELALPSK |
| | | YVNFLYLASHYEKLKGSPEDNEQKQLFVEQHKHYLDEIIEQISEF |
| | | SKRVILADANLDKVLSAYNKHRDKPIREQAENIIHLFTLTNLGAP |
| | | AAFKYFDTTIDRKRYTSTKEVLDATLIHQSITGLYETRIDLSQLGG |
| | | DAYPYDVPDYASLGSGSPKKKRKVEDPKKKRKVDGSGSETPGTSES |
| | | ATPES<RTLVTFKDVFVDFTREEWKLLDTAQQIVYRNVMLENYK |
| | | NLVSLGYQLTKPDVILRLEKGEEP>* |
| 85 | GFP1- | MPAAKRVKLDGSSKGEELFTGVVPILVELDGDVNGHKFSVRGEGEGD |
| | 10- | ATIGKLTLKFICTTGKLPVPWPTLVTTLTYGVQCFSRYPDHMKRHDFFKS |
| | KRAB | AMPEGYVQERTISFKDDGKYKTRAVVKFEGDTLVNRIELKGTDFKEDGN |
| | | ILGHKLEYNFNSHNVYITADKQKNGIKANFTVRHNVEDGSVQLADHYQQ |
| | | NTPIGDGPVLLPDNHYLSTQTVLSKDPNEKLDPGGGGSG<RTLVTFKD |
| | | VFVDFTREEWKLLDTAQQIVYRNVMLENYKNLVSLGYQLTKPD |
| | | VILRLEKGEEP>* |
| 86 | DNMT3A- | MPAAKRVKLDGSNHDQEFDPPKVYPPVPAEKRKPIRVLSLFDGIATG |
| | DNMT3L- | LLVLKDLGIQVDRYIASEVCEDSITVGMVRHQGKIMYVGDVRSVTQK |
| | dCas9- | HIQEWGPFDLVIGGSPCNDLSIVNPARKGLYEGTGRLFFEFYRLLHD |
| | 1xGFP11 | ARPKEGDDRPFFWLFENVVAMGVSDKRDISRFLESNPVMIDAKEVS |
| | | AAHRARYFWGNLPGMNRPLASTVNDKLELQECLEHGRIAKFSKVRT |
| | | ITTRSNSIKQGKDQHFPVFMNEKEDILWCTEMERVFGFPVHYTDVS |
| | | NMSRLARQRLLGRSWSVPVIRHLFAPLKEYFACVSSGNSNANSRGPS |
| | | FSSGLVPLSLRGSHMGPMEIYKTVSAWKRQPVRVLSLFRNIDKVLKSL |
| | | GFLESGSGSGGGTLKYVEDVTNVVRRDVEKWGPFDLVYGSTQPLGS |
| | | SCDRCPGWYMFQFHRILQYALPRQESQRPFFWIFMDNLLLTEDDQE |
| | | TTTRFLQTEAVTLQDVRGRDYQNAMRVWSNIPGLKSKHAPLTPKEE |
| | | EYLQAQVRSRSKLDAPKVDLLVKNCLLPLREYFKYFSQNSLPLGGPSS |
| | | GAPPPSGGSPAGSPTSTEEGTSESATPESGPGTSTEPSEGSAPGSPAGSP |
| | | TSTEEGTSTEPSEGSAPGTSTEPSEPKKKRKVMDKKYSIGLAIGTNSV |
| | | GWAVITDEYKVPSKKFKVLGNTDRHSIKKNLIGALLFDSGETAE |
| | | ATRLKRTARRRYTRRKNRICYLQEIFSNEMAKVDDSFFHRLEESF |
| | | LVEEDKKHERHPIFGNIVDEVAYHEKYPTIYHLRKKLVDSTDKA |
| | | DLRLIYLALAHMIKFRGHFLIEGDLNPDNSDVDKLFIQLVQTYNQ |
| | | LFEENPINASGVDAKAILSARLSKSRRLENLIAQLPGEKKNGLFG |
| | | NLIALSLGLTPNFKSNFDLAEDAKLQLSKDTYDDDLDNLLAQIGD |
| | | QYADLFLAAKNLSDAILLSDILRVNTEITKAPLSASMIKRYDEHH |
| | | QDLTLLKALVRQQLPEKYKEIFFDQSKNGYAGYIDGGASQEEFY |
| | | KFIKPILEKMDGTEELLVKLNREDLLRKQRTFDNGSIPHQIHLGE |
| | | LHAILRRQEDFYPFLKDNREKIEKILTFRIPYYVGPLARGNSRFA |
| | | WMTRKSEETITPWNFEEVVDKGASAQSFIERMTNFDKNLPNEKV |
| | | LPKHSLLYEYFTVYNELTKVKYVTEGMRKPAFLSGEQKKAIVDL |
| | | LFKTNRKVTVKQLKEDYFKKIECFDSVEISGVEDRFNASLGTYHD |
| | | LLKIIKDKDFLDNEENEDILEDIVLTLTLFEDREMIEERLKTYAHL |
| | | FDDKVMKQLKRRRYTGWGRLSRKLINGIRDKQSGKTILDFLKSD |
| | | GFANRNFMQLIHDDSLTFKEDIQKAQVSGQGDSLHEHIANLAGSP |
| | | AIKKGILQTVKVVDELVKVMGRHKPENIVIEMARENQTTQKGQ |
| | | KNSRERMKRIEEGIKELGSQILKEHPVENTQLQNEKLYLYYLQN |
| | | GRDMYVDQELDINRLSDYDVDAIVPQSFLKDDSIDNKVLTRSDKN |
| | | RGKSDNVPSEEVVKKMKNYWRQLLNAKLITQRKFDNLTKAERG |
| | | GLSELDKAGFIKRQLVETRQITKHVAQILDSRMNTKYDENDKLIR |
| | | EVKVITLKSKLVSDFRKDFQFYKVREINNYHHAHDAYLNAVVGT |
| | | ALIKKYPKLESEFVYGDYKVYDVRKMIAKSEQEIGKATAKYFFY |
| | | SNIMNFFKTEITLANGEIRKRPLIETNGETGEIVWDKGRDFATVR |
| | | KVLSMPQVNIVKKTEVQTGGFSKESILPKRNSDKLIARKKDWDP |
| | | KKYGGFDSPTVAYSVLVVAKVEKGKSKKLKSVKELLGITIMERS |
| | | SFEKNPIDFLEAKGYKEVKKDLIIKLPKYSLFELENGRKRMLASA |
| | | GELQKGNELALPSKYVNFLYLASHYEKLKGSPEDNEQKQLFVEQ |
| | | HKHYLDEIIEQISEFSKRVILADANLDKVLSAYNKHRDKPIREQAE |
| | | NIIHLFTLTNLGAPAAFKYFDTTIDRKRYTSTKEVLDATLIHQSIT |
| | | GLYETRIDLSQLGGDAYPYDVPDYASLGSGSPKKKRKVEDPKKKR |
| | | KVDGSGSETPGTSESATPESGSGSNGSSGSMRDHMVLHEYVNAAGITG |
| | | GSGGAAARSGSGQRGSKRTADGSEFESPKKKRKV* |
| 87 | DNMT3A- | MPAAKRVKLDGSNHDQEFDPPKVYPPVPAEKRKPIRVLSLFDGIATG |
| | DNMT3L- | LLVLKDLGIQVDRYIASEVCEDSITVGMVRHQGKIMYVGDVRSVTQK |
| | dCas9- | HIQEWGPFDLVIGGSPCNDLSIVNPARKGLYEGTGRLFFEFYRLLHD |
| | 7xGFP11 | ARPKEGDDRPFFWLFENVVAMGVSDKRDISRFLESNPVMIDAKEVS |
| | | AAHRARYFWGNLPGMNRPLASTVNDKLELQECLEHGRIAKFSKVRT |
| | | ITTRSNSIKQGKDQHFPVFMNEKEDILWCTEMERVFGFPVHYTDVS |
| | | NMSRLARQRLLGRSWSVPVIRHLFAPLKEYFACVSSGNSNANSRGPS |
| | | FSSGLVPLSLRGSHMGPMEIYKTVSAWKRQPVRVLSLFRNIDKVLKSL |
| | | GFLESGSGSGGGTLKYVEDVTNVVRRDVEKWGPFDLVYGSTQPLGS |
| | | SCDRCPGWYMFQFHRILQYALPRQESQRPFFWIFMDNLLLTEDDQE |
| | | TTTRFLQTEAVTLQDVRGRDYQNAMRVWSNIPGLKSKHAPLTPKEE |
| | | EYLQAQVRSRSKLDAPKVDLLVKNCLLPLREYFKYFSQNSLPLGGPSS |
| | | GAPPPSGGSPAGSPTSTEEGTSESATPESGPGTSTEPSEGSAPGSPAGSP |
| | | TSTEEGTSTEPSEGSAPGTSTEPSEPKKKRKVMDKKYSIGLAIGTNSV |
| | | GWAVITDEYKVPSKKFKVLGNTDRHSIKKNLIGALLFDSGETAE |
| | | ATRLKRTARRRYTRRKNRICYLQEIFSNEMAKVDDSFFHRLEESF |
| | | LVEEDKKHERHPIFGNIVDEVAYHEKYPTIYHLRKKLVDSTDKA |
| | | DLRLIYLALAHMIKFRGHFLIEGDLNPDNSDVDKLFIQLVQTYNQ |
| | | LFEENPINASGVDAKAILSARLSKSRRLENLIAQLPGEKKNGLFG |
| | | NLIALSLGLTPNFKSNFDLAEDAKLQLSKDTYDDDLDNLLAQIGD |
| | | QYADLFLAAKNLSDAILLSDILRVNTEITKAPLSASMIKRYDEHH |
| | | QDLTLLKALVRQQLPEKYKEIFFDQSKNGYAGYIDGGASQEEFY |
| | | KFIKPILEKMDGTEELLVKLNREDLLRKQRTFDNGSIPHQIHLGE |
| | | LHAILRRQEDFYPFLKDNREKIEKILTFRIPYYVGPLARGNSRFA |
| | | WMTRKSEETITPWNFEEVVDKGASAQSFIERMTNFDKNLPNEKV |
| | | LPKHSLLYEYFTVYNELTKVKYVTEGMRKPAFLSGEQKKAIVDL |
| | | LFKTNRKVTVKQLKEDYFKKIECFDSVEISGVEDRFNASLGTYHD |
| | | LLKIIKDKDFLDNEENEDILEDIVLTLTLFEDREMIEERLKTYAHL |
| | | FDDKVMKQLKRRRYTGWGRLSRKLINGIRDKQSGKTILDFLKSD |
| | | GFANRNFMQLIHDDSLTFKEDIQKAQVSGQGDSLHEHIANLAGSP |
| | | AIKKGILQTVKVVDELVKVMGRHKPENIVIEMARENQTTQKGQ |
| | | KNSRERMKRIEEGIKELGSQILKEHPVENTQLQNEKLYLYYLQN |
| | | GRDMYVDQELDINRLSDYDVDAIVPQSFLKDDSIDNKVLTRSDKN |
| | | RGKSDNVPSEEVVKKMKNYWRQLLNAKLITQRKFDNLTKAERG |
| | | GLSELDKAGFIKRQLVETRQITKHVAQILDSRMNTKYDENDKLIR |
| | | EVKVITLKSKLVSDFRKDFQFYKVREINNYHHAHDAYLNAVVGT |
| | | ALIKKYPKLESEFVYGDYKVYDVRKMIAKSEQEIGKATAKYFFY |
| | | SNIMNFFKTEITLANGEIRKRPLIETNGETGEIVWDKGRDFATVR |
| | | KVLSMPQVNIVKKTEVQTGGFSKESILPKRNSDKLIARKKDWDP |
| | | KKYGGFDSPTVAYSVLVVAKVEKGKSKKLKSVKELLGITIMERS |
| | | SFEKNPIDFLEAKGYKEVKKDLIIKLPKYSLFELENGRKRMLASA |
| | | GELQKGNELALPSKYVNFLYLASHYEKLKGSPEDNEQKQLFVEQ |
| | | HKHYLDEIIEQISEFSKRVILADANLDKVLSAYNKHRDKPIREQAE |
| | | NIIHLFTLTNLGAPAAFKYFDTTIDRKRYTSTKEVLDATLIHQSIT |
| | | GLYETRIDLSQLGGDAYPYDVPDYASLGSGSPKKKRKVEDPKKKR |
| | | KVDGSGSETPGTSESATPESGSGSNGSSGSMRDHMVLHEYVNAAGITG |
| | | GSGGRDHMVLHEYVNAAGITGGSGGRDHMVLHEYVNAAGITGGSGGR |
| | | DHMVLHEYVNAAGITGGSGGRDHMVLHEYVNAAGITGGSGGRDHMVL |
| | | HEYVNAAGITGGSGGRDHMVLHEYVNAAGITAAARSGSGQRGSKRTA |
| | | DGSEFESPKKKRKV* |
| 88 | DNMT3A- | MPAAKRVKLDGSNHDQEFDPPKVYPPVPAEKRKPIRVLSLFDGIATG |
| | hDNMT3L- | LLVLKDLGIQVDRYIASEVCEDSITVGMVRHQGKIMYVGDVRSVTQK |
| | dCas9- | HIQEWGPFDLVIGGSPCNDLSIVNPARKGLYEGTGRLFFEFYRLLHD |
| | 1xGCN4 | ARPKEGDDRPFFWLFENVVAMGVSDKRDISRFLESNPVMIDAKEVS |
| | | AAHRARYFWGNLPGMNRPLASTVNDKLELQECLEHGRIAKFSKVRT |
| | | ITTRSNSIKQGKDQHFPVFMNEKEDILWCTEMERVFGFPVHYTDVS |
| | | NMSRLARQRLLGRSWSVPVIRHLFAPLKEYFACVSSGNSNANSRGPS |
| | | FSSGLVPLSLRGSHMFETVPVWRRQPVRVLSLFEDIKKELTSLGFLES |
| | | GSDPGQLKHVVDVTDTVRKDVEEWGPFDLVYGATPPLGHTCDRPPS |
| | | WYLFQFHRLLQYARPKPGSPRPFFWMFVDNLVLNKEDLDVASRFLE |
| | | MEPVTIPDVHGGSLQNAVRVWSNIPAIRSSRHWALVSEEELSLLAQN |
| | | KQSSKLAAKWPTKLVKNCFLPLREYFKYFSGGPSSGAPPPSGGSPAGS |
| | | PTSTEEGTSESATPESGPGTSTEPSEGSAPGSPAGSPTSTEEGTSTEPSE |
| | | GSAPGTSTEPSEPKKKRKVMDKKYSIGLAIGTNSVGWAVITDEYKV |
| | | PSKKFKVLGNTDRHSIKKNLIGALLFDSGETAEATRLKRTARRRY |
| | | TRRKNRICYLQEIFSNEMAKVDDSFFHRLEESFLVEEDKKHERHP |
| | | IFGNIVDEVAYHEKYPTIYHLRKKLVDSTDKADLRLIYLALAHMI |
| | | KFRGHFLIEGDLNPDNSDVDKLFIQLVQTYNQLFEENPINASGVD |
| | | AKAILSARLSKSRRLENLIAQLPGEKKNGLFGNLIALSLGLTPNFK |
| | | SNFDLAEDAKLQLSKDTYDDDLDNLLAQIGDQYADLFLAAKNLS |
| | | DAILLSDILRVNTEITKAPLSASMIKRYDEHHQDLTLLKALVRQQ |
| | | LPEKYKEIFFDQSKNGYAGYIDGGASQEEFYKFIKPILEKMDGTE |
| | | ELLVKLNREDLLRKQRTFDNGSIPHQIHLGELHAILRRQEDFYPF |
| | | LKDNREKIEKILTFRIPYYVGPLARGNSRFAWMTRKSEETITPWN |
| | | FEEVVDKGASAQSFIERMTNFDKNLPNEKVLPKHSLLYEYFTVY |
| | | NELTKVKYVTEGMRKPAFLSGEQKKAIVDLLFKTNRKVTVKQL |
| | | KEDYFKKIECFDSVEISGVEDRFNASLGTYHDLLKIIKDKDFLDNE |
| | | ENEDILEDIVLTLTLFEDREMIEERLKTYAHLFDDKVMKQLKRR |
| | | RYTGWGRLSRKLINGIRDKQSGKTILDFLKSDGFANRNFMQLIH |
| | | DDSLTFKEDIQKAQVSGQGDSLHEHIANLAGSPAIKKGILQTVKV |
| | | VDELVKVMGRHKPENIVIEMARENQTTQKGQKNSRERMKRIEE |
| | | GIKELGSQILKEHPVENTQLQNEKLYLYYLQNGRDMYVDQELDI |
| | | NRLSDYDVDAIVPQSFLKDDSIDNKVLTRSDKNRGKSDNVPSEEV |
| | | VKKMKNYWRQLLNAKLITQRKFDNLTKAERGGLSELDKAGFIK |
| | | RQLVETRQITKHVAQILDSRMNTKYDENDKLIREVKVITLKSKLV |
| | | SDFRKDFQFYKVREINNYHHAHDAYLNAVVGTALIKKYPKLESE |
| | | FVYGDYKVYDVRKMIAKSEQEIGKATAKYFFYSNIMNFFKTEITL |
| | | ANGEIRKRPLIETNGETGEIVWDKGRDFATVRKVLSMPQVNIVK |
| | | KTEVQTGGFSKESILPKRNSDKLIARKKDWDPKKYGGFDSPTVA |
| | | YSVLVVAKVEKGKSKKLKSVKELLGITIMERSSFEKNPIDFLEAK |
| | | GYKEVKKDLIIKLPKYSLFELENGRKRMLASAGELQKGNELALP |
| | | SKYVNFLYLASHYEKLKGSPEDNEQKQLFVEQHKHYLDEIIEQIS |
| | | EFSKRVILADANLDKVLSAYNKHRDKPIREQAENIIHLFTLTNLG |
| | | APAAFKYFDTTIDRKRYTSTKEVLDATLIHQSITGLYETRIDLSQL |
| | | GGDAYPYDVPDYASLGSGSPKKKRKVEDPKKKRKVDGIGSGSNGSS |
| | | GEELLSKNYHLENEVARLKKGSGSGGSGSGGSGSGSGGSGSGGSGSGE |
| | | ELLSKNYHGSGSGQRGSKRTADGSEFESPKKKRKV* |
| 89 | DNMT3A- | MPAAKRVKLDGSNHDQEFDPPKVYPPVPAEKRKPIRVLSLFDGIATG |
| | hDNMT3L- | LLVLKDLGIQVDRYIASEVCEDSITVGMVRHQGKIMYVGDVRSVTQK |
| | dCas9- | HIQEWGPFDLVIGGSPCNDLSIVNPARKGLYEGTGRLFFEFYRLLHD |
| | 2xGCN4 | ARPKEGDDRPFFWLFENVVAMGVSDKRDISRFLESNPVMIDAKEVS |
| | | AAHRARYFWGNLPGMNRPLASTVNDKLELQECLEHGRIAKFSKVRT |
| | | ITTRSNSIKQGKDQHFPVFMNEKEDILWCTEMERVFGFPVHYTDVS |
| | | NMSRLARQRLLGRSWSVPVIRHLFAPLKEYFACVSSGNSNANSRGPS |
| | | FSSGLVPLSLRGSHMFETVPVWRRQPVRVLSLFEDIKKELTSLGFLES |
| | | GSDPGQLKHVVDVTDTVRKDVEEWGPFDLVYGATPPLGHTCDRPPS |
| | | WYLFQFHRLLQYARPKPGSPRPFFWMFVDNLVLNKEDLDVASRFLE |
| | | MEPVTIPDVHGGSLQNAVRVWSNIPAIRSSRHWALVSEEELSLLAQN |
| | | KQSSKLAAKWPTKLVKNCFLPLREYFKYFSGGPSSGAPPPSGGSPAGS |
| | | PTSTEEGTSESATPESGPGTSTEPSEGSAPGSPAGSPTSTEEGTSTEPSE |
| | | GSAPGTSTEPSEPKKKRKVMDKKYSIGLAIGTNSVGWAVITDEYKV |
| | | PSKKFKVLGNTDRHSIKKNLIGALLFDSGETAEATRLKRTARRRY |
| | | TRRKNRICYLQEIFSNEMAKVDDSFFHRLEESFLVEEDKKHERHP |
| | | IFGNIVDEVAYHEKYPTIYHLRKKLVDSTDKADLRLIYLALAHMI |
| | | KFRGHFLIEGDLNPDNSDVDKLFIQLVQTYNQLFEENPINASGVD |
| | | AKAILSARLSKSRRLENLIAQLPGEKKNGLFGNLIALSLGLTPNFK |
| | | SNFDLAEDAKLQLSKDTYDDDLDNLLAQIGDQYADLFLAAKNLS |
| | | DAILLSDILRVNTEITKAPLSASMIKRYDEHHQDLTLLKALVRQQ |
| | | LPEKYKEIFFDQSKNGYAGYIDGGASQEEFYKFIKPILEKMDGTE |
| | | ELLVKLNREDLLRKQRTFDNGSIPHQIHLGELHAILRRQEDFYPF |
| | | LKDNREKIEKILTFRIPYYVGPLARGNSRFAWMTRKSEETITPWN |
| | | FEEVVDKGASAQSFIERMTNFDKNLPNEKVLPKHSLLYEYFTVY |
| | | NELTKVKYVTEGMRKPAFLSGEQKKAIVDLLFKTNRKVTVKQL |
| | | KEDYFKKIECFDSVEISGVEDRFNASLGTYHDLLKIIKDKDFLDNE |
| | | ENEDILEDIVLTLTLFEDREMIEERLKTYAHLFDDKVMKQLKRR |
| | | RYTGWGRLSRKLINGIRDKQSGKTILDFLKSDGFANRNFMQLIH |
| | | DDSLTFKEDIQKAQVSGQGDSLHEHIANLAGSPAIKKGILQTVKV |
| | | VDELVKVMGRHKPENIVIEMARENQTTQKGQKNSRERMKRIEE |
| | | GIKELGSQILKEHPVENTQLQNEKLYLYYLQNGRDMYVDQELDI |
| | | NRLSDYDVDAIVPQSFLKDDSIDNKVLTRSDKNRGKSDNVPSEEV |
| | | VKKMKNYWRQLLNAKLITQRKFDNLTKAERGGLSELDKAGFIK |
| | | RQLVETRQITKHVAQILDSRMNTKYDENDKLIREVKVITLKSKLV |
| | | SDFRKDFQFYKVREINNYHHAHDAYLNAVVGTALIKKYPKLESE |
| | | FVYGDYKVYDVRKMIAKSEQEIGKATAKYFFYSNIMNFFKTEITL |
| | | ANGEIRKRPLIETNGETGEIVWDKGRDFATVRKVLSMPQVNIVK |
| | | KTEVQTGGFSKESILPKRNSDKLIARKKDWDPKKYGGFDSPTVA |
| | | YSVLVVAKVEKGKSKKLKSVKELLGITIMERSSFEKNPIDFLEAK |
| | | GYKEVKKDLIIKLPKYSLFELENGRKRMLASAGELQKGNELALP |
| | | SKYVNFLYLASHYEKLKGSPEDNEQKQLFVEQHKHYLDEIIEQIS |
| | | EFSKRVILADANLDKVLSAYNKHRDKPIREQAENIIHLFTLTNLG |
| | | APAAFKYFDTTIDRKRYTSTKEVLDATLIHQSITGLYETRIDLSQL |
| | | GGDAYPYDVPDYASLGSGSPKKKRKVEDPKKKRKVDGIGSGSNGSS |
| | | GEELLSKNYHLENEVARLKKGSGSGGSGSGGSGSGSGGSGSGGSGSGE |
| | | ELLSKNYHLENEVARLKKGSGSGQRGSKRTADGSEFESPKKKRKV* |
| 90 | DNMT3A- | MPAAKRVKLDGSNHDQEFDPPKVYPPVPAEKRKPIRVLSLFDGIATG |
| | hDNMT3L- | LLVLKDLGIQVDRYIASEVCEDSITVGMVRHQGKIMYVGDVRSVTQK |
| | dCas9- | HIQEWGPFDLVIGGSPCNDLSIVNPARKGLYEGTGRLFFEFYRLLHD |
| | 10xGCN4 | ARPKEGDDRPFFWLFENVVAMGVSDKRDISRFLESNPVMIDAKEVS |
| | | AAHRARYFWGNLPGMNRPLASTVNDKLELQECLEHGRIAKFSKVRT |
| | | ITTRSNSIKQGKDQHFPVFMNEKEDILWCTEMERVFGFPVHYTDVS |
| | | NMSRLARQRLLGRSWSVPVIRHLFAPLKEYFACVSSGNSNANSRGPS |
| | | FSSGLVPLSLRGSHMFETVPVWRRQPVRVLSLFEDIKKELTSLGFLES |
| | | GSDPGQLKHVVDVTDTVRKDVEEWGPFDLVYGATPPLGHTCDRPPS |
| | | WYLFQFHRLLQYARPKPGSPRPFFWMFVDNLVLNKEDLDVASRFLE |
| | | MEPVTIPDVHGGSLQNAVRVWSNIPAIRSSRHWALVSEEELSLLAQN |
| | | KQSSKLAAKWPTKLVKNCFLPLREYFKYFSGGPSSGAPPPSGGSPAGS |
| | | PTSTEEGTSESATPESGPGTSTEPSEGSAPGSPAGSPTSTEEGTSTEPSE |
| | | GSAPGTSTEPSEPKKKRKVMDKKYSIGLAIGTNSVGWAVITDEYKV |
| | | PSKKFKVLGNTDRHSIKKNLIGALLFDSGETAEATRLKRTARRRY |
| | | TRRKNRICYLQEIFSNEMAKVDDSFFHRLEESFLVEEDKKHERHP |
| | | IFGNIVDEVAYHEKYPTIYHLRKKLVDSTDKADLRLIYLALAHMI |
| | | KFRGHFLIEGDLNPDNSDVDKLFIQLVQTYNQLFEENPINASGVD |
| | | AKAILSARLSKSRRLENLIAQLPGEKKNGLFGNLIALSLGLTPNFK |
| | | SNFDLAEDAKLQLSKDTYDDDLDNLLAQIGDQYADLFLAAKNLS |
| | | DAILLSDILRVNTEITKAPLSASMIKRYDEHHQDLTLLKALVRQQ |
| | | LPEKYKEIFFDQSKNGYAGYIDGGASQEEFYKFIKPILEKMDGTE |
| | | ELLVKLNREDLLRKQRTFDNGSIPHQIHLGELHAILRRQEDFYPF |
| | | LKDNREKIEKILTFRIPYYVGPLARGNSRFAWMTRKSEETITPWN |
| | | FEEVVDKGASAQSFIERMTNFDKNLPNEKVLPKHSLLYEYFTVY |
| | | NELTKVKYVTEGMRKPAFLSGEQKKAIVDLLFKTNRKVTVKQL |
| | | KEDYFKKIECFDSVEISGVEDRFNASLGTYHDLLKIIKDKDFLDNE |
| | | ENEDILEDIVLTLTLFEDREMIEERLKTYAHLFDDKVMKQLKRR |
| | | RYTGWGRLSRKLINGIRDKQSGKTILDFLKSDGFANRNFMQLIH |
| | | DDSLTFKEDIQKAQVSGQGDSLHEHIANLAGSPAIKKGILQTVKV |
| | | VDELVKVMGRHKPENIVIEMARENQTTQKGQKNSRERMKRIEE |
| | | GIKELGSQILKEHPVENTQLQNEKLYLYYLQNGRDMYVDQELDI |
| | | NRLSDYDVDAIVPQSFLKDDSIDNKVLTRSDKNRGKSDNVPSEEV |
| | | VKKMKNYWRQLLNAKLITQRKFDNLTKAERGGLSELDKAGFIK |
| | | RQLVETRQITKHVAQILDSRMNTKYDENDKLIREVKVITLKSKLV |
| | | SDFRKDFQFYKVREINNYHHAHDAYLNAVVGTALIKKYPKLESE |
| | | FVYGDYKVYDVRKMIAKSEQEIGKATAKYFFYSNIMNFFKTEITL |
| | | ANGEIRKRPLIETNGETGEIVWDKGRDFATVRKVLSMPQVNIVK |
| | | KTEVQTGGFSKESILPKRNSDKLIARKKDWDPKKYGGFDSPTVA |
| | | YSVLVVAKVEKGKSKKLKSVKELLGITIMERSSFEKNPIDFLEAK |
| | | GYKEVKKDLIIKLPKYSLFELENGRKRMLASAGELQKGNELALP |
| | | SKYVNFLYLASHYEKLKGSPEDNEQKQLFVEQHKHYLDEIIEQIS |
| | | EFSKRVILADANLDKVLSAYNKHRDKPIREQAENIIHLFTLTNLG |
| | | APAAFKYFDTTIDRKRYTSTKEVLDATLIHQSITGLYETRIDLSQL |
| | | GGDAYPYDVPDYASLGSGSPKKKRKVEDPKKKRKVDGIGSGSNGSS |
| | | GEELLSKNYHLENEVARLKKGSGSGGSGSGGSGSGSGGSGSGGSGSGE |
| | | ELLSKNYHLENEVARLKKGSGSGGSGSGGSGSGSGGSGSGGSGSGEEL |
| | | LSKNYHLENEVARLKKGSGSGGSGSGGSGSGSGGSGSGGSGSGEELLS |
| | | KNYHLENEVARLKKGSGSGGSGSGGSGSGSGGSGSGGSGSGEELLSKN |
| | | YHLENEVARLKKGSGSGGSGSGGSGSGSGGSGSGGSGSGEELLSKNYH |
| | | LENEVARLKKGSGSGGSGSGGSGSGSGGSGSGGSGSGEELLSKNYHLE |
| | | NEVARLKKGSGSGGSGSGGSGSGSGGSGSGGSGSGEELLSKNYHLENE |
| | | VARLKKGSGSGGSGSGGSGSGSGGSGSGGSGSGEELLSKNYHLENEVA |
| | | RLKKGSGSGGSGSGGSGSGSGGSGSGGSGSGEELLSKNYHLENEVARL |
| | | KKGSGSGQRGSKRTADGSEFESPKKKRKV* |
| 91 | DNMT3A- | MPAAKRVKLDGSNHDQEFDPPKVYPPVPAEKRKPIRVLSLFDGIATG |
| | hDNMT3L- | LLVLKDLGIQVDRYIASEVCEDSITVGMVRHQGKIMYVGDVRSVTQK |
| | dCas12a- | HIQEWGPFDLVIGGSPCNDLSIVNPARKGLYEGTGRLFFEFYRLLHD |
| | 1xGCN4 | ARPKEGDDRPFFWLFENVVAMGVSDKRDISRFLESNPVMIDAKEVS |
| | | AAHRARYFWGNLPGMNRPLASTVNDKLELQECLEHGRIAKFSKVRT |
| | | ITTRSNSIKQGKDQHFPVFMNEKEDILWCTEMERVFGFPVHYTDVS |
| | | NMSRLARQRLLGRSWSVPVIRHLFAPLKEYFACVSSGNSNANSRGPS |
| | | FSSGLVPLSLRGSHMFETVPVWRRQPVRVLSLFEDIKKELTSLGFLES |
| | | GSDPGQLKHVVDVTDTVRKDVEEWGPFDLVYGATPPLGHTCDRPPS |
| | | WYLFQFHRLLQYARPKPGSPRPFFWMFVDNLVLNKEDLDVASRFLE |
| | | MEPVTIPDVHGGSLQNAVRVWSNIPAIRSSRHWALVSEEELSLLAQN |
| | | KQSSKLAAKWPTKLVKNCFLPLREYFKYFSGGPSSGAPPPSGGSPAGS |
| | | PTSTEEGTSESATPESGPGTSTEPSEGSAPGSPAGSPTSTEEGTSTEPSE |
| | | GSAPGTSTEPSEPKKKRKVMSKLEKFTNCYSLSKTLRFKAIPVGKT |
| | | QENIDNKRLLVEDEKRAEDYKGVKKLLDRYYLSFINDVLHSIKL |
| | | KNLNNYISLFRKKTRTEKENKELENLEINLRKEIAKAFKGNEGYK |
| | | SLFKKDIIETILPEFLDDKDEIALVNSFNGFTTAFTGFFDNRENMFS |
| | | EEAKSTSIAFRCINENLTRYISNMDIFEKVDAIFDKHEVQEIKEKIL |
| | | NSDYDVEDFFEGEFFNFVLTQEGIDVYNAIIGGFVTESGEKIKGLN |
| | | EYINLYNQKTKQKLPKFKPLYKQVLSDRESLSFYGEGYTSDEEVL |
| | | EVFRNTLNKNSEIFSSIKKLEKLFKNFDEYSSAGIFVKNGPAISTIS |
| | | KDIFGEWNVIRDKWNAEYDDIHLKKKAVVTEKYEDDRRKSFKKI |
| | | GSFSLEQLQEYADADLSVVEKLKEIIIQKVDEIYKVYGSSEKLFDA |
| | | DFVLEKSLKKNDAVVAIMKDLLDSVKSFENYIKAFFGEGKETNR |
| | | DESFYGDFVLAYDILLKVDHIYDAIRNYVTQKPYSKDKFKLYFQN |
| | | PQFMGGWDKDKETDYRATILRYGSKYYLAIMDKKYAKCLQKID |
| | | KDDVNGNYEKINYKLLPGPNKMLPKVFFSKKWMAYYNPSEDIQ |
| | | KIYKNGTFKKGDMFNLNDCHKLIDFFKDSISRYPKWSNAYDFNFS |
| | | ETEKYKDIAGFYREVEEQGYKVSFESASKKEVDKLVEEGKLYMF |
| | | QIYNKDFSDKSHGTPNLHTMYFKLLFDENNHGQIRLSGGAELFM |
| | | RRASLKKEELVVHPANSPIANKNPDNPKKTTTLSYDVYKDKRFSE |
| | | DQYELHIPIAINKCPKNIFKINTEVRVLLKHDDNPYVIGIARGERN |
| | | LLYIVVVDGKGNIVEQYSLNEIINNENGIRIKTDYHSLLDKKEKER |
| | | FEARQNWTSIENIKELKAGYISQVVHKICELVEKYDAVIALADLN |
| | | SGFKNSRVKVEKQVYQKFEKMLIDKLNYMVDKKSNPCATGGAL |
| | | KGYQITNKFESFKSMSTQNGFIFYIPAWLTSKIDPSTGFVNLLKTK |
| | | YTSIADSKKFISSFDRIMYVPEEDLFEFALDYKNFSRTDADYIKKW |
| | | KLYSYGNRIRIFRNPKKNNVFDWEEVCLTSAYKELFNKYGINYQ |
| | | QGDIRALLCEQSDKAFYSSFMALMSLMLQMRNSITGRTDVAFLIS |
| | | PVKNSDGIFYDSRNYEAQENAILPKNADANGAYNIARKVLWAIG |
| | | QFKKAEDEKLDKVKIAISNKEWLEYAQTSVKHAYPYDVPDYASL |
| | | GSGSPKKKRKVEDPKKKRKVDGIGSGSNGSSGEELLSKNYHLENEVAR |
| | | LKKGSGSGGSGSGGSGSGSGGSGSGGSGSGEELLSKNYHGSGSGQRG |
| | | SKRTADGSEFESPKKKRKV* |
| 92 | DNMT3A- | MPAAKRVKLDGSNHDQEFDPPKVYPPVPAEKRKPIRVLSLFDGIATG |
| | hDNMT3L- | LLVLKDLGIQVDRYIASEVCEDSITVGMVRHQGKIMYVGDVRSVTQK |
| | dCas12i- | HIQEWGPFDLVIGGSPCNDLSIVNPARKGLYEGTGRLFFEFYRLLHD |
| | 1xGCN4 | ARPKEGDDRPFFWLFENVVAMGVSDKRDISRFLESNPVMIDAKEVS |
| | | AAHRARYFWGNLPGMNRPLASTVNDKLELQECLEHGRIAKFSKVRT |
| | | ITTRSNSIKQGKDQHFPVFMNEKEDILWCTEMERVFGFPVHYTDVS |
| | | NMSRLARQRLLGRSWSVPVIRHLFAPLKEYFACVSSGNSNANSRGPS |
| | | FSSGLVPLSLRGSHMFETVPVWRRQPVRVLSLFEDIKKELTSLGFLES |
| | | GSDPGQLKHVVDVTDTVRKDVEEWGPFDLVYGATPPLGHTCDRPPS |
| | | WYLFQFHRLLQYARPKPGSPRPFFWMFVDNLVLNKEDLDVASRFLE |
| | | MEPVTIPDVHGGSLQNAVRVWSNIPAIRSSRHWALVSEEELSLLAQN |
| | | KQSSKLAAKWPTKLVKNCFLPLREYFKYFSGGPSSGAPPPSGGSPAGS |
| | | PTSTEEGTSESATPESGPGTSTEPSEGSAPGSPAGSPTSTEEGTSTEPSE |
| | | GSAPGTSTEPSEPKKKRKVMGITMSDTTFRPYKSKLNPNERKMPM |
| | | VVDTMNWCDNACSVFFDLFVGLYGGVKIGDVTNFLTEKQDTTT |
| | | DADLLCAINWFRAMPVSNPDAVVGPEQLVVRFRDYSGHNPSPMA |
| | | SMYLSAPVNPRYTWVDCRFLYQQMCQTLGANLDVDISTLVQTG |
| | | LLPIQKDTQLNAYSFCSNVFGEGVKEDPSAKVTSYTAAANALSGA |
| | | TNPIITYEDYRQILSSAITNRPSRKGAKDILAADLDSTKTGVLPGN |
| | | YVSQRIAMYQASAASKARGVVLPNRLRVKAYLQNLVGLNYICTT |
| | | WAAPMLRAVGDIKSKNSNNYRFVGERLERQQEIDNLLAVSNIRS |
| | | AQAILQQFRANESNQFYIKKRHIGKGLPSLYDMWDLMDEKEGID |
| | | NYIQSLKGDKTERLPIRELLQIIYPHRKSVSAELFLSAAELTDVED |
| | | RQNRCMVHPTVRGSLVINFGKSSTIFGAITPPDTLIKFRGEMVPA |
| | | GQTGMIWFTMHLVDGGKWVKHHIPCHSSRYFEEIYAWKKDLPT |
| | | LPFPRRSLYGYAIGNKISDTRKIDLRRKKASKQYLRTLENMTHNV |
| | | EFDPTTQFMVDQELNVTITARVKKIPPVRDVPVGSRIMGLNKNQ |
| | | TIRDCYSIWERVEANTSGSFQHPVVQDVWLRLVADGHVTSTVNG |
| | | PNGQIDQMSYSGPDVANCGNWMQERSNFITSVDDADQSIMKHFL |
| | | WNNRVKLYAWNCVYAGTLMKAISKQMTTANRNLFRNEILSFVG |
| | | GRFGCRLGSLAQVSLDLLRRMKSVISCYFSRNNAFTIEERSAFDK |
| | | ELMELFESLDNKMNNKRKEKVNRTLSSIFQVAKQHNVVRLVVT |
| | | KNLQTPDANVRSVMNQRSVDWCARKIEEKIVDLGNVIGIYVDLV |
| | | EALDLSHLDPFIYIAKGDVGKECQFDEVESSSLLPIHTSMFRDWH |
| | | GLVNKGRTTTPIYHSALRSFASHYGLRFDDLARIKAAELAKMLP |
| | | DQKVFIPHRGGRFFMSTYPVTSTSRPVSYDGRQRFLNSGDMVAP |
| | | VNTMLRGFRRARSAYPYDVPDYASLGSGSPKKKRKVEDPKKKRKV |
| | | DGIGSGSNGSSGEELLSKNYHLENEVARLKKGSGSGGSGSGGSGSGSG |
| | | GSGSGGSGSGEELLSKNYHGSGSGQRGSKRTADGSEFESPKKKRKV* |
| 93 | KRAB- | MPAAKRVKLDGS<RTLVTFKDVFVDFTREEWKLLDTAQQIVYRN |
| | scFv | VMLENYKNLVSLGYQLTKPDVILRLEKGEEP>GSGMGPDIVMTQS |
| | | PSSLSASVGDRVTITCRSSTGAVTTSNYASWVQEKPGKLFKGLIGGTNNRA |
| | | PGVPSRFSGSLIGDKATLTISSLQPEDFATYFCALWYSNHWVFGQGTKVE |
| | | LKRGGGGSGGGGSGGGGSSGGGSEVKLLESGGGLVQPGGSLKLSCAVS |
| | | GFSLTDYGVNWVRQAPGRGLEWIGVIWGDGITDYNSALKDRFIISKDNG |
| | | KNTVYLQMSKVRSDDTALYYCVTGLFDYWGQGTLVTVSSYPYDVPDYA |
| | | GGGGGSGGGGSGGGGSGGGGSGSG* |
| 94 | 1xGCN4- | MPAAKRVKLDGSGSGGSGSGEELLSKNYHLENEVARLKKGSGSGGSG |
| | dCas9- | SGGSGSGSGGSGSGGSGSGPKKKRKVMDKKYSIGLAIGTNSVGWA |
| | KRAB | VITDEYKVPSKKFKVLGNTDRHSIKKNLIGALLFDSGETAEATRL |
| | | KRTARRRYTRRKNRICYLQEIFSNEMAKVDDSFFHRLEESFLVEE |
| | | DKKHERHPIFGNIVDEVAYHEKYPTIYHLRKKLVDSTDKADLRLI |
| | | YLALAHMIKFRGHFLIEGDLNPDNSDVDKLFIQLVQTYNQLFEEN |
| | | PINASGVDAKAILSARLSKSRRLENLIAQLPGEKKNGLFGNLIALS |
| | | LGLTPNFKSNFDLAEDAKLQLSKDTYDDDLDNLLAQIGDQYADL |
| | | FLAAKNLSDAILLSDILRVNTEITKAPLSASMIKRYDEHHQDLTLL |
| | | KALVRQQLPEKYKEIFFDQSKNGYAGYIDGGASQEEFYKFIKPIL |
| | | EKMDGTEELLVKLNREDLLRKQRTFDNGSIPHQIHLGELHAILR |
| | | RQEDFYPFLKDNREKIEKILTFRIPYYVGPLARGNSRFAWMTRKS |
| | | EETITPWNFEEVVDKGASAQSFIERMTNFDKNLPNEKVLPKHSLL |
| | | YEYFTVYNELTKVKYVTEGMRKPAFLSGEQKKAIVDLLFKTNRK |
| | | VTVKQLKEDYFKKIECFDSVEISGVEDRFNASLGTYHDLLKIIKD |
| | | KDFLDNEENEDILEDIVLTLTLFEDREMIEERLKTYAHLFDDKVM |
| | | KQLKRRRYTGWGRLSRKLINGIRDKQSGKTILDFLKSDGFANRN |
| | | FMQLIHDDSLTFKEDIQKAQVSGQGDSLHEHIANLAGSPAIKKGI |
| | | LQTVKVVDELVKVMGRHKPENIVIEMARENQTTQKGQKNSRER |
| | | MKRIEEGIKELGSQILKEHPVENTQLQNEKLYLYYLQNGRDMYV |
| | | DQELDINRLSDYDVDAIVPQSFLKDDSIDNKVLTRSDKNRGKSDN |
| | | VPSEEVVKKMKNYWRQLLNAKLITQRKFDNLTKAERGGLSELD |
| | | KAGFIKRQLVETRQITKHVAQILDSRMNTKYDENDKLIREVKVIT |
| | | LKSKLVSDFRKDFQFYKVREINNYHHAHDAYLNAVVGTALIKKY |
| | | PKLESEFVYGDYKVYDVRKMIAKSEQEIGKATAKYFFYSNIMNFF |
| | | KTEITLANGEIRKRPLIETNGETGEIVWDKGRDFATVRKVLSMPQ |
| | | VNIVKKTEVQTGGFSKESILPKRNSDKLIARKKDWDPKKYGGFD |
| | | SPTVAYSVLVVAKVEKGKSKKLKSVKELLGITIMERSSFEKNPID |
| | | FLEAKGYKEVKKDLIIKLPKYSLFELENGRKRMLASAGELQKGN |
| | | ELALPSKYVNFLYLASHYEKLKGSPEDNEQKQLFVEQHKHYLDE |
| | | IIEQISEFSKRVILADANLDKVLSAYNKHRDKPIREQAENIIHLFTL |
| | | TNLGAPAAFKYFDTTIDRKRYTSTKEVLDATLIHQSITGLYETRID |
| | | LSQLGGDAYPYDVPDYASLGSGSPKKKRKVEDPKKKRKVDGSGSE |
| | | TPGTSESATPES<RTLVTFKDVFVDFTREEWKLLDTAQQIVYRNV |
| | | MLENYKNLVSLGYQLTKPDVILRLEKGEEP>* |
| 95 | 2xGCN4- | MPAAKRVKLDGSEELLSKNYHLENEVARLKKGSGSGGSGSGGSGSGS |
| | dCas9- | GGSGSGGSGSGEELLSKNYHLENEVARLKKGSGSGGSGSGGSGSGSGG |
| | KRAB | SGSGGSGSGPKKKRKVMDKKYSIGLAIGTNSVGWAVITDEYKVPS |
| | | KKFKVLGNTDRHSIKKNLIGALLFDSGETAEATRLKRTARRRYT |
| | | RRKNRICYLQEIFSNEMAKVDDSFFHRLEESFLVEEDKKHERHPI |
| | | FGNIVDEVAYHEKYPTIYHLRKKLVDSTDKADLRLIYLALAHMIK |
| | | FRGHFLIEGDLNPDNSDVDKLFIQLVQTYNQLFEENPINASGVDA |
| | | KAILSARLSKSRRLENLIAQLPGEKKNGLFGNLIALSLGLTPNFKS |
| | | NFDLAEDAKLQLSKDTYDDDLDNLLAQIGDQYADLFLAAKNLSD |
| | | AILLSDILRVNTEITKAPLSASMIKRYDEHHQDLTLLKALVRQQL |
| | | PEKYKEIFFDQSKNGYAGYIDGGASQEEFYKFIKPILEKMDGTEE |
| | | LLVKLNREDLLRKQRTFDNGSIPHQIHLGELHAILRRQEDFYPFL |
| | | KDNREKIEKILTFRIPYYVGPLARGNSRFAWMTRKSEETITPWNF |
| | | EEVVDKGASAQSFIERMTNFDKNLPNEKVLPKHSLLYEYFTVYN |
| | | ELTKVKYVTEGMRKPAFLSGEQKKAIVDLLFKTNRKVTVKQLK |
| | | EDYFKKIECFDSVEISGVEDRFNASLGTYHDLLKIIKDKDFLDNEE |
| | | NEDILEDIVLTLTLFEDREMIEERLKTYAHLFDDKVMKQLKRRR |
| | | YTGWGRLSRKLINGIRDKQSGKTILDFLKSDGFANRNFMQLIHD |
| | | DSLTFKEDIQKAQVSGQGDSLHEHIANLAGSPAIKKGILQTVKVV |
| | | DELVKVMGRHKPENIVIEMARENQTTQKGQKNSRERMKRIEEGI |
| | | KELGSQILKEHPVENTQLQNEKLYLYYLQNGRDMYVDQELDINR |
| | | LSDYDVDAIVPQSFLKDDSIDNKVLTRSDKNRGKSDNVPSEEVVK |
| | | KMKNYWRQLLNAKLITQRKFDNLTKAERGGLSELDKAGFIKRQ |
| | | LVETRQITKHVAQILDSRMNTKYDENDKLIREVKVITLKSKLVSD |
| | | FRKDFQFYKVREINNYHHAHDAYLNAVVGTALIKKYPKLESEFV |
| | | YGDYKVYDVRKMIAKSEQEIGKATAKYFFYSNIMNFFKTEITLAN |
| | | GEIRKRPLIETNGETGEIVWDKGRDFATVRKVLSMPQVNIVKKT |
| | | EVQTGGFSKESILPKRNSDKLIARKKDWDPKKYGGFDSPTVAYS |
| | | VLVVAKVEKGKSKKLKSVKELLGITIMERSSFEKNPIDFLEAKGY |
| | | KEVKKDLIIKLPKYSLFELENGRKRMLASAGELQKGNELALPSK |
| | | YVNFLYLASHYEKLKGSPEDNEQKQLFVEQHKHYLDEIIEQISEF |
| | | SKRVILADANLDKVLSAYNKHRDKPIREQAENIIHLFTLTNLGAP |
| | | AAFKYFDTTIDRKRYTSTKEVLDATLIHQSITGLYETRIDLSQLGG |
| | | DAYPYDVPDYASLGSGSPKKKRKVEDPKKKRKVDGSGSETPGTSES |
| | | ATPES<RTLVTFKDVFVDFTREEWKLLDTAQQIVYRNVMLENYK |
| | | NLVSLGYQLTKPDVILRLEKGEEP>* |
| 96 | 5xGCN4- | MPAAKRVKLDGSEELLSKNYHLENEVARLKKGSGSGGSGSGGSGSGS |
| | dCas9- | GGSGSGGSGSGEELLSKNYHLENEVARLKKGSGSGGSGSGGSGSGSGG |
| | KRAB | SGSGGSGSGEELLSKNYHLENEVARLKKGSGSGGSGSGGSGSGSGGSG |
| | | SGGSGSGEELLSKNYHLENEVARLKKGSGSGGSGSGGSGSGSGGSGSG |
| | | GSGSGEELLSKNYHLENEVARLKKGSGSGGSGSGGSGSGSGGSGSGGS |
| | | GSGPKKKRKVMDKKYSIGLAIGTNSVGWAVITDEYKVPSKKFKV |
| | | LGNTDRHSIKKNLIGALLFDSGETAEATRLKRTARRRYTRRKNRI |
| | | CYLQEIFSNEMAKVDDSFFHRLEESFLVEEDKKHERHPIFGNIVD |
| | | EVAYHEKYPTIYHLRKKLVDSTDKADLRLIYLALAHMIKFRGHF |
| | | LIEGDLNPDNSDVDKLFIQLVQTYNQLFEENPINASGVDAKAILSA |
| | | RLSKSRRLENLIAQLPGEKKNGLFGNLIALSLGLTPNFKSNFDLA |
| | | EDAKLQLSKDTYDDDLDNLLAQIGDQYADLFLAAKNLSDAILLSD |
| | | ILRVNTEITKAPLSASMIKRYDEHHQDLTLLKALVRQQLPEKYKE |
| | | IFFDQSKNGYAGYIDGGASQEEFYKFIKPILEKMDGTEELLVKLN |
| | | REDLLRKQRTFDNGSIPHQIHLGELHAILRRQEDFYPFLKDNREK |
| | | IEKILTFRIPYYVGPLARGNSRFAWMTRKSEETITPWNFEEVVDK |
| | | GASAQSFIERMTNFDKNLPNEKVLPKHSLLYEYFTVYNELTKVK |
| | | YVTEGMRKPAFLSGEQKKAIVDLLFKTNRKVTVKQLKEDYFKKI |
| | | ECFDSVEISGVEDRFNASLGTYHDLLKIIKDKDFLDNEENEDILED |
| | | IVLTLTLFEDREMIEERLKTYAHLFDDKVMKQLKRRRYTGWGR |
| | | LSRKLINGIRDKQSGKTILDFLKSDGFANRNFMQLIHDDSLTFKE |
| | | DIQKAQVSGQGDSLHEHIANLAGSPAIKKGILQTVKVVDELVKV |
| | | MGRHKPENIVIEMARENQTTQKGQKNSRERMKRIEEGIKELGSQ |
| | | ILKEHPVENTQLQNEKLYLYYLQNGRDMYVDQELDINRLSDYDV |
| | | DAIVPQSFLKDDSIDNKVLTRSDKNRGKSDNVPSEEVVKKMKNY |
| | | WRQLLNAKLITQRKFDNLTKAERGGLSELDKAGFIKRQLVETRQ |
| | | ITKHVAQILDSRMNTKYDENDKLIREVKVITLKSKLVSDFRKDFQ |
| | | FYKVREINNYHHAHDAYLNAVVGTALIKKYPKLESEFVYGDYKV |
| | | YDVRKMIAKSEQEIGKATAKYFFYSNIMNFFKTEITLANGEIRKR |
| | | PLIETNGETGEIVWDKGRDFATVRKVLSMPQVNIVKKTEVQTGG |
| | | FSKESILPKRNSDKLIARKKDWDPKKYGGFDSPTVAYSVLVVAK |
| | | VEKGKSKKLKSVKELLGITIMERSSFEKNPIDFLEAKGYKEVKKD |
| | | LIIKLPKYSLFELENGRKRMLASAGELQKGNELALPSKYVNFLYL |
| | | ASHYEKLKGSPEDNEQKQLFVEQHKHYLDEIIEQISEFSKRVILA |
| | | DANLDKVLSAYNKHRDKPIREQAENIIHLFTLTNLGAPAAFKYFD |
| | | TTIDRKRYTSTKEVLDATLIHQSITGLYETRIDLSQLGGDAYPYDV |
| | | PDYASLGSGSPKKKRKVEDPKKKRKVDGSGSETPGTSESATPES<RT |
| | | LVTFKDVFVDFTREEWKLLDTAQQIVYRNVMLENYKNLVSLGY |
| | | QLTKPDVILRLEKGEEP |
| 97 | DNMT3A- | MPAAKRVKLDGSNHDQEFDPPKVYPPVPAEKRKPIRVLSLFDGIATG |
| | hDNMT3L- | LLVLKDLGIQVDRYIASEVCEDSITVGMVRHQGKIMYVGDVRSVTQK |
| | scFv | HIQEWGPFDLVIGGSPCNDLSIVNPARKGLYEGTGRLFFEFYRLLHD |
| | | ARPKEGDDRPFFWLFENVVAMGVSDKRDISRFLESNPVMIDAKEVS |
| | | AAHRARYFWGNLPGMNRPLASTVNDKLELQECLEHGRIAKFSKVRT |
| | | ITTRSNSIKQGKDQHFPVFMNEKEDILWCTEMERVFGFPVHYTDVS |
| | | NMSRLARQRLLGRSWSVPVIRHLFAPLKEYFACVSSGNSNANSRGPS |
| | | FSSGLVPLSLRGSHMFETVPVWRRQPVRVLSLFEDIKKELTSLGFLES |
| | | GSDPGQLKHVVDVTDTVRKDVEEWGPFDLVYGATPPLGHTCDRPPS |
| | | WYLFQFHRLLQYARPKPGSPRPFFWMFVDNLVLNKEDLDVASRFLE |
| | | MEPVTIPDVHGGSLQNAVRVWSNIPAIRSSRHWALVSEEELSLLAQN |
| | | KQSSKLAAKWPTKLVKNCFLPLREYFKYFSGGPSSGAPPPSGGSPAGS |
| | | PTSTEEGTSESATPESGPGTSTEPSEGSAPGSPAGSPTSTEEGTSTEPSE |
| | | GSAPGTSTEPSEPKKKRKVPSEGPDIVMTQSPSSLSASVGDRVTITCRSST |
| | | GAVTTSNYASWVQEKPGKLFKGLIGGTNNRAPGVPSRFSGSLIGDKATLTI |
| | | SSLQPEDFATYFCALWYSNHWVFGQGTKVELKRGGGGSGGGGSGGGGS |
| | | SGGGSEVKLLESGGGLVQPGGSLKLSCAVSGFSLTDYGVNWVRQAPGRG |
| | | LEWIGVIWGDGITDYNSALKDRFIISKDNGKNTVYLQMSKVRSDDTALYY |
| | | CVTGLFDYWGQGTLVTVSSYPYDVPDYAGGGGGSGGGGSGGGGSGG |
| | | GGSGSG* |
| 98 | 3xGCN4- | MPAAKRVKLDGSEELLSKNYHLENEVARLKKGSGSGGSGSGGSGSGS |
| | dCas9- | GGSGSGGSGSGEELLSKNYHLENEVARLKKGSGSGGSGSGGSGSGSGG |
| | ZIM3 | SGSGGSGSGEELLSKNYHLENEVARLKKGSGSGGSGSGGSGSGSGGSG |
| | | SGGSGSGPKKKRKVMDKKYSIGLAIGTNSVGWAVITDEYKVPSKK |
| | | FKVLGNTDRHSIKKNLIGALLFDSGETAEATRLKRTARRRYTRR |
| | | KNRICYLQEIFSNEMAKVDDSFFHRLEESFLVEEDKKHERHPIFG |
| | | NIVDEVAYHEKYPTIYHLRKKLVDSTDKADLRLIYLALAHMIKFR |
| | | GHFLIEGDLNPDNSDVDKLFIQLVQTYNQLFEENPINASGVDAKA |
| | | ILSARLSKSRRLENLIAQLPGEKKNGLFGNLIALSLGLTPNFKSNF |
| | | DLAEDAKLQLSKDTYDDDLDNLLAQIGDQYADLFLAAKNLSDAI |
| | | LLSDILRVNTEITKAPLSASMIKRYDEHHQDLTLLKALVRQQLPE |
| | | KYKEIFFDQSKNGYAGYIDGGASQEEFYKFIKPILEKMDGTEELL |
| | | VKLNREDLLRKQRTFDNGSIPHQIHLGELHAILRRQEDFYPFLKD |
| | | NREKIEKILTFRIPYYVGPLARGNSRFAWMTRKSEETITPWNFEE |
| | | VVDKGASAQSFIERMTNFDKNLPNEKVLPKHSLLYEYFTVYNEL |
| | | TKVKYVTEGMRKPAFLSGEQKKAIVDLLFKTNRKVTVKQLKED |
| | | YFKKIECFDSVEISGVEDRFNASLGTYHDLLKIIKDKDFLDNEENE |
| | | DILEDIVLTLTLFEDREMIEERLKTYAHLFDDKVMKQLKRRRYT |
| | | GWGRLSRKLINGIRDKQSGKTILDFLKSDGFANRNFMQLIHDDSL |
| | | TFKEDIQKAQVSGQGDSLHEHIANLAGSPAIKKGILQTVKVVDEL |
| | | VKVMGRHKPENIVIEMARENQTTQKGQKNSRERMKRIEEGIKE |
| | | LGSQILKEHPVENTQLQNEKLYLYYLQNGRDMYVDQELDINRLS |
| | | DYDVDAIVPQSFLKDDSIDNKVLTRSDKNRGKSDNVPSEEVVKK |
| | | MKNYWRQLLNAKLITQRKFDNLTKAERGGLSELDKAGFIKRQL |
| | | VETRQITKHVAQILDSRMNTKYDENDKLIREVKVITLKSKLVSDF |
| | | RKDFQFYKVREINNYHHAHDAYLNAVVGTALIKKYPKLESEFVY |
| | | GDYKVYDVRKMIAKSEQEIGKATAKYFFYSNIMNFFKTEITLAN |
| | | GEIRKRPLIETNGETGEIVWDKGRDFATVRKVLSMPQVNIVKKT |
| | | EVQTGGFSKESILPKRNSDKLIARKKDWDPKKYGGFDSPTVAYS |
| | | VLVVAKVEKGKSKKLKSVKELLGITIMERSSFEKNPIDFLEAKGY |
| | | KEVKKDLIIKLPKYSLFELENGRKRMLASAGELQKGNELALPSK |
| | | YVNFLYLASHYEKLKGSPEDNEQKQLFVEQHKHYLDEIIEQISEF |
| | | SKRVILADANLDKVLSAYNKHRDKPIREQAENIIHLFTLTNLGAP |
| | | AAFKYFDTTIDRKRYTSTKEVLDATLIHQSITGLYETRIDLSQLGG |
| | | DAYPYDVPDYASLGSGSPKKKRKVEDPKKKRKVDGSGSETPGTSES |
| | | ATPES<MNNSQGRVTFEDVTVNFTQGEWQRLNPEQRNLYRDVM |
| | | LENYSNLVSVGQGETTKPDVILRLEQGKEPWLEEEEVLGSGRAE |
| | | KNGDIGGQIWKPKDVKESL>* |
| 99 | 3xGCN4- | MPAAKRVKLDGSEELLSKNYHLENEVARLKKGSGSGGSGSGGSGSGS |
| | dCas12a- | GGSGSGGSGSGEELLSKNYHLENEVARLKKGSGSGGSGSGGSGSGSGG |
| | ZIM3 | SGSGGSGSGEELLSKNYHLENEVARLKKGSGSGGSGSGGSGSGSGGSG |
| | | SGGSGSGPKKKRKVMSKLEKFTNCYSLSKTLRFKAIPVGKTQENI |
| | | DNKRLLVEDEKRAEDYKGVKKLLDRYYLSFINDVLHSIKLKNLN |
| | | NYISLFRKKTRTEKENKELENLEINLRKEIAKAFKGNEGYKSLFK |
| | | KDIIETILPEFLDDKDEIALVNSFNGFTTAFTGFFDNRENMFSEEA |
| | | KSTSIAFRCINENLTRYISNMDIFEKVDAIFDKHEVQEIKEKILNSD |
| | | YDVEDFFEGEFFNFVLTQEGIDVYNAIIGGFVTESGEKIKGLNEYI |
| | | NLYNQKTKQKLPKFKPLYKQVLSDRESLSFYGEGYTSDEEVLEV |
| | | FRNTLNKNSEIFSSIKKLEKLFKNFDEYSSAGIFVKNGPAISTISKDI |
| | | FGEWNVIRDKWNAEYDDIHLKKKAVVTEKYEDDRRKSFKKIGSF |
| | | SLEQLQEYADADLSVVEKLKEIIIQKVDEIYKVYGSSEKLFDADFV |
| | | LEKSLKKNDAVVAIMKDLLDSVKSFENYIKAFFGEGKETNRDESF |
| | | YGDFVLAYDILLKVDHIYDAIRNYVTQKPYSKDKFKLYFQNPQF |
| | | MGGWDKDKETDYRATILRYGSKYYLAIMDKKYAKCLQKIDKDD |
| | | VNGNYEKINYKLLPGPNKMLPKVFFSKKWMAYYNPSEDIQKIYK |
| | | NGTFKKGDMFNLNDCHKLIDFFKDSISRYPKWSNAYDFNFSETE |
| | | KYKDIAGFYREVEEQGYKVSFESASKKEVDKLVEEGKLYMFQIY |
| | | NKDFSDKSHGTPNLHTMYFKLLFDENNHGQIRLSGGAELFMRRA |
| | | SLKKEELVVHPANSPIANKNPDNPKKTTTLSYDVYKDKRFSEDQY |
| | | ELHIPIAINKCPKNIFKINTEVRVLLKHDDNPYVIGIARGERNLLYI |
| | | VVVDGKGNIVEQYSLNEIINNENGIRIKTDYHSLLDKKEKERFEA |
| | | RQNWTSIENIKELKAGYISQVVHKICELVEKYDAVIALADLNSGF |
| | | KNSRVKVEKQVYQKFEKMLIDKLNYMVDKKSNPCATGGALKG |
| | | YQITNKFESFKSMSTQNGFIFYIPAWLTSKIDPSTGFVNLLKTKYT |
| | | SIADSKKFISSFDRIMYVPEEDLFEFALDYKNFSRTDADYIKKWKL |
| | | YSYGNRIRIFRNPKKNNVFDWEEVCLTSAYKELFNKYGINYQQG |
| | | DIRALLCEQSDKAFYSSFMALMSLMLQMRNSITGRTDVAFLISPV |
| | | KNSDGIFYDSRNYEAQENAILPKNADANGAYNIARKVLWAIGQF |
| | | KKAEDEKLDKVKIAISNKEWLEYAQTSVKHAYPYDVPDYASLGS |
| | | GSPKKKRKVEDPKKKRKVDGSGSETPGTSESATPES<MNNSQGRVT |
| | | FEDVTVNFTQGEWQRLNPEQRNLYRDVMLENYSNLVSVGQGET |
| | | TKPDVILRLEQGKEPWLEEEEVLGSGRAEKNGDIGGQIWKPKDV |
| | | KESL>* |
| 100 | 3xGCN4- | MPAAKRVKLDGSEELLSKNYHLENEVARLKKGSGSGGSGSGGSGSGS |
| | dCas12i- | GGSGSGGSGSGEELLSKNYHLENEVARLKKGSGSGGSGSGGSGSGSGG |
| | ZIM3 | SGSGGSGSGEELLSKNYHLENEVARLKKGSGSGGSGSGGSGSGSGGSG |
| | | SGGSGSGPKKKRKVMGITMSDTTFRPYKSKLNPNERKMPMVVDT |
| | | MNWCDNACSVFFDLFVGLYGGVKIGDVTNFLTEKQDTTTDADL |
| | | LCAINWFRAMPVSNPDAVVGPEQLVVRFRDYSGHNPSPMASMYL |
| | | SAPVNPRYTWVDCRFLYQQMCQTLGANLDVDISTLVQTGLLPIQ |
| | | KDTQLNAYSFCSNVFGEGVKEDPSAKVTSYTAAANALSGATNPII |
| | | TYEDYRQILSSAITNRPSRKGAKDILAADLDSTKTGVLPGNYVSQ |
| | | RIAMYQASAASKARGVVLPNRLRVKAYLQNLVGLNYICTTWAA |
| | | PMLRAVGDIKSKNSNNYRFVGERLERQQEIDNLLAVSNIRSAQAI |
| | | LQQFRANESNQFYIKKRHIGKGLPSLYDMWDLMDEKEGIDNYIQ |
| | | SLKGDKTERLPIRELLQIIYPHRKSVSAELFLSAAELTDVEDRQNR |
| | | CMVHPTVRGSLVINFGKSSTIFGAITPPDTLIKFRGEMVPAGQTG |
| | | MIWFTMHLVDGGKWVKHHIPCHSSRYFEEIYAWKKDLPTLPFP |
| | | RRSLYGYAIGNKISDTRKIDLRRKKASKQYLRTLENMTHNVEFD |
| | | PTTQFMVDQELNVTITARVKKIPPVRDVPVGSRIMGLNKNQTIRD |
| | | CYSIWERVEANTSGSFQHPVVQDVWLRLVADGHVTSTVNGPNG |
| | | QIDQMSYSGPDVANCGNWMQERSNFITSVDDADQSIMKHFLWN |
| | | NRVKLYAWNCVYAGTLMKAISKQMTTANRNLFRNEILSFVGGR |
| | | FGCRLGSLAQVSLDLLRRMKSVISCYFSRNNAFTIEERSAFDKEL |
| | | MELFESLDNKMNNKRKEKVNRTLSSIFQVAKQHNVVRLVVTKN |
| | | LQTPDANVRSVMNQRSVDWCARKIEEKIVDLGNVIGIYVDLVEA |
| | | LDLSHLDPFIYIAKGDVGKECQFDEVESSSLLPIHTSMFRDWHGL |
| | | VNKGRTTTPIYHSALRSFASHYGLRFDDLARIKAAELAKMLPDQ |
| | | KVFIPHRGGRFFMSTYPVTSTSRPVSYDGRQRFLNSGDMVAPVN |
| | | TMLRGFRRARSAYPYDVPDYASLGSGSPKKKRKVEDPKKKRKVDG |
| | | SGSETPGTSESATPES<MNNSQGRVTFEDVTVNFTQGEWQRLNPE |
| | | QRNLYRDVMLENYSNLVSVGQGETTKPDVILRLEQGKEPWLEE |
| | | EEVLGSGRAEKNGDIGGQIWKPKDVKESL>* |
| 101 | 10xGCN4- | MPAAKRVKLDGSEELLSKNYHLENEVARLKKGSGSGGSGSGGSGSGS |
| | dCas9- | GGSGSGGSGSGEELLSKNYHLENEVARLKKGSGSGGSGSGGSGSGSGG |
| | ZIM3 | SGSGGSGSGEELLSKNYHLENEVARLKKGSGSGGSGSGGSGSGSGGSG |
| | | SGGSGSGEELLSKNYHLENEVARLKKGSGSGGSGSGGSGSGSGGSGSG |
| | | GSGSGEELLSKNYHLENEVARLKKGSGSGGSGSGGSGSGSGGSGSGGS |
| | | GSGEELLSKNYHLENEVARLKKGSGSGGSGSGGSGSGSGGSGSGGSGS |
| | | GEELLSKNYHLENEVARLKKGSGSGGSGSGGSGSGSGGSGSGGSGSGE |
| | | ELLSKNYHLENEVARLKKGSGSGGSGSGGSGSGSGGSGSGGSGSGEEL |
| | | LSKNYHLENEVARLKKGSGSGGSGSGGSGSGSGGSGSGGSGSGEELLS |
| | | KNYHLENEVARLKKGSGSGPKKKRKVMDKKYSIGLAIGTNSVGWAV |
| | | ITDEYKVPSKKFKVLGNTDRHSIKKNLIGALLFDSGETAEATRLK |
| | | RTARRRYTRRKNRICYLQEIFSNEMAKVDDSFFHRLEESFLVEED |
| | | KKHERHPIFGNIVDEVAYHEKYPTIYHLRKKLVDSTDKADLRLIY |
| | | LALAHMIKFRGHFLIEGDLNPDNSDVDKLFIQLVQTYNQLFEENP |
| | | INASGVDAKAILSARLSKSRRLENLIAQLPGEKKNGLFGNLIALSL |
| | | GLTPNFKSNFDLAEDAKLQLSKDTYDDDLDNLLAQIGDQYADLF |
| | | LAAKNLSDAILLSDILRVNTEITKAPLSASMIKRYDEHHQDLTLLK |
| | | ALVRQQLPEKYKEIFFDQSKNGYAGYIDGGASQEEFYKFIKPILE |
| | | KMDGTEELLVKLNREDLLRKQRTFDNGSIPHQIHLGELHAILRR |
| | | QEDFYPFLKDNREKIEKILTFRIPYYVGPLARGNSRFAWMTRKSE |
| | | ETITPWNFEEVVDKGASAQSFIERMTNFDKNLPNEKVLPKHSLLY |
| | | EYFTVYNELTKVKYVTEGMRKPAFLSGEQKKAIVDLLFKTNRKV |
| | | TVKQLKEDYFKKIECFDSVEISGVEDRFNASLGTYHDLLKIIKDK |
| | | DFLDNEENEDILEDIVLTLTLFEDREMIEERLKTYAHLFDDKVMK |
| | | QLKRRRYTGWGRLSRKLINGIRDKQSGKTILDFLKSDGFANRNF |
| | | MQLIHDDSLTFKEDIQKAQVSGQGDSLHEHIANLAGSPAIKKGIL |
| | | QTVKVVDELVKVMGRHKPENIVIEMARENQTTQKGQKNSRERM |
| | | KRIEEGIKELGSQILKEHPVENTQLQNEKLYLYYLQNGRDMYVD |
| | | QELDINRLSDYDVDAIVPQSFLKDDSIDNKVLTRSDKNRGKSDNV |
| | | PSEEVVKKMKNYWRQLLNAKLITQRKFDNLTKAERGGLSELDK |
| | | AGFIKRQLVETRQITKHVAQILDSRMNTKYDENDKLIREVKVITL |
| | | KSKLVSDFRKDFQFYKVREINNYHHAHDAYLNAVVGTALIKKYP |
| | | KLESEFVYGDYKVYDVRKMIAKSEQEIGKATAKYFFYSNIMNFF |
| | | KTEITLANGEIRKRPLIETNGETGEIVWDKGRDFATVRKVLSMPQ |
| | | VNIVKKTEVQTGGFSKESILPKRNSDKLIARKKDWDPKKYGGFD |
| | | SPTVAYSVLVVAKVEKGKSKKLKSVKELLGITIMERSSFEKNPID |
| | | FLEAKGYKEVKKDLIIKLPKYSLFELENGRKRMLASAGELQKGN |
| | | ELALPSKYVNFLYLASHYEKLKGSPEDNEQKQLFVEQHKHYLDE |
| | | IIEQISEFSKRVILADANLDKVLSAYNKHRDKPIREQAENIIHLFTL |
| | | TNLGAPAAFKYFDTTIDRKRYTSTKEVLDATLIHQSITGLYETRID |
| | | LSQLGGDAYPYDVPDYASLGSGSPKKKRKVEDPKKKRKVDGSGSE |
| | | TPGTSESATPES<MNNSQGRVTFEDVTVNFTQGEWQRLNPEQRNL |
| | | YRDVMLENYSNLVSVGQGETTKPDVILRLEQGKEPWLEEEEVLG |
| | | SGRAEKNGDIGGQIWKPKDVKESL>* |
| 102 | scFv- | MPAAKRVKLDGSGPDIVMTQSPSSLSASVGDRVTITCRSSTGAVTTSNYA |
| | hDNMT3L- | SWVQEKPGKLFKGLIGGTNNRAPGVPSRFSGSLIGDKATLTISSLQPEDF |
| | DNMT3A | ATYFCALWYSNHWVFGQGTKVELKRGGGGSGGGGSGGGGSSGGGSEV |
| | | KLLESGGGLVQPGGSLKLSCAVSGFSLTDYGVNWVRQAPGRGLEWIGVI |
| | | WGDGITDYNSALKDRFIISKDNGKNTVYLQMSKVRSDDTALYYCVTGLFD |
| | | YWGQGTLVTVSSYPYDVPDYAGGGGGSGGGGSGGGGSGGGGSMFET |
| | | VPVWRRQPVRVLSLFEDIKKELTSLGFLESGSDPGQLKHVVDVTDTV |
| | | RKDVEEWGPFDLVYGATPPLGHTCDRPPSWYLFQFHRLLQYARPKP |
| | | GSPRPFFWMFVDNLVLNKEDLDVASRFLEMEPVTIPDVHGGSLQNA |
| | | VRVWSNIPAIRSSRHWALVSEEELSLLAQNKQSSKLAAKWPTKLVKN |
| | | CFLPLREYFKYFSTELTSSLSSGNSNANSRGPSFSSGLVPLSLRGSHM |
| | | NHDQEFDPPKVYPPVPAEKRKPIRVLSLFDGIATGLLVLKDLGIQVD |
| | | RYIASEVCEDSITVGMVRHQGKIMYVGDVRSVTQKHIQEWGPFDLVI |
| | | GGSPCNDLSIVNPARKGLYEGTGRLFFEFYRLLHDARPKEGDDRPFF |
| | | WLFENVVAMGVSDKRDISRFLESNPVMIDAKEVSAAHRARYFWGNL |
| | | PGMNRPLASTVNDKLELQECLEHGRIAKFSKVRTITTRSNSIKQGKD |
| | | QHFPVFMNEKEDILWCTEMERVFGFPVHYTDVSNMSRLARQRLLG |
| | | RSWSVPVIRHLFAPLKEYFACV* |
| 103 | 1xGCN4- | MPAAKRVKLDGSEELLSKNYHLENEVARLKKGSGSGGSGSGGSGSGS |
| | ZIM3 | GGSGSGGSGSG<MNNSQGRVTFEDVTVNFTQGEWQRLNPEQRNL |
| | | YRDVMLENYSNLVSVGQGETTKPDVILRLEQGKEPWLEEEEVLG |
| | | SGRAEKNGDIGGQIWKPKDVKESL>* |
| 104 | DNMT3A- | MPAAKRVKLDGSNHDQEFDPPKVYPPVPAEKRKPIRVLSLFDGIATG |
| | hDNMT3L- | LLVLKDLGIQVDRYIASEVCEDSITVGMVRHQGKIMYVGDVRSVTQK |
| | dCas9- | HIQEWGPFDLVIGGSPCNDLSIVNPARKGLYEGTGRLFFEFYRLLHD |
| | scFv | ARPKEGDDRPFFWLFENVVAMGVSDKRDISRFLESNPVMIDAKEVS |
| | | AAHRARYFWGNLPGMNRPLASTVNDKLELQECLEHGRIAKFSKVRT |
| | | ITTRSNSIKQGKDQHFPVFMNEKEDILWCTEMERVFGFPVHYTDVS |
| | | NMSRLARQRLLGRSWSVPVIRHLFAPLKEYFACVSSGNSNANSRGPS |
| | | FSSGLVPLSLRGSHMFETVPVWRRQPVRVLSLFEDIKKELTSLGFLES |
| | | GSDPGQLKHVVDVTDTVRKDVEEWGPFDLVYGATPPLGHTCDRPPS |
| | | WYLFQFHRLLQYARPKPGSPRPFFWMFVDNLVLNKEDLDVASRFLE |
| | | MEPVTIPDVHGGSLQNAVRVWSNIPAIRSSRHWALVSEEELSLLAQN |
| | | KQSSKLAAKWPTKLVKNCFLPLREYFKYFSGGPSSGAPPPSGGSPAGS |
| | | PTSTEEGTSESATPESGPGTSTEPSEGSAPGSPAGSPTSTEEGTSTEPSE |
| | | GSAPGTSTEPSEPKKKRKVMDKKYSIGLAIGTNSVGWAVITDEYKV |
| | | PSKKFKVLGNTDRHSIKKNLIGALLFDSGETAEATRLKRTARRRY |
| | | TRRKNRICYLQEIFSNEMAKVDDSFFHRLEESFLVEEDKKHERHP |
| | | IFGNIVDEVAYHEKYPTIYHLRKKLVDSTDKADLRLIYLALAHMI |
| | | KFRGHFLIEGDLNPDNSDVDKLFIQLVQTYNQLFEENPINASGVD |
| | | AKAILSARLSKSRRLENLIAQLPGEKKNGLFGNLIALSLGLTPNFK |
| | | SNFDLAEDAKLQLSKDTYDDDLDNLLAQIGDQYADLFLAAKNLS |
| | | DAILLSDILRVNTEITKAPLSASMIKRYDEHHQDLTLLKALVRQQ |
| | | LPEKYKEIFFDQSKNGYAGYIDGGASQEEFYKFIKPILEKMDGTE |
| | | ELLVKLNREDLLRKQRTFDNGSIPHQIHLGELHAILRRQEDFYPF |
| | | LKDNREKIEKILTFRIPYYVGPLARGNSRFAWMTRKSEETITPWN |
| | | FEEVVDKGASAQSFIERMTNFDKNLPNEKVLPKHSLLYEYFTVY |
| | | NELTKVKYVTEGMRKPAFLSGEQKKAIVDLLFKTNRKVTVKQL |
| | | KEDYFKKIECFDSVEISGVEDRFNASLGTYHDLLKIIKDKDFLDNE |
| | | ENEDILEDIVLTLTLFEDREMIEERLKTYAHLFDDKVMKQLKRR |
| | | RYTGWGRLSRKLINGIRDKQSGKTILDFLKSDGFANRNFMQLIH |
| | | DDSLTFKEDIQKAQVSGQGDSLHEHIANLAGSPAIKKGILQTVKV |
| | | VDELVKVMGRHKPENIVIEMARENQTTQKGQKNSRERMKRIEE |
| | | GIKELGSQILKEHPVENTQLQNEKLYLYYLQNGRDMYVDQELDI |
| | | NRLSDYDVDAIVPQSFLKDDSIDNKVLTRSDKNRGKSDNVPSEEV |
| | | VKKMKNYWRQLLNAKLITQRKFDNLTKAERGGLSELDKAGFIK |
| | | RQLVETRQITKHVAQILDSRMNTKYDENDKLIREVKVITLKSKLV |
| | | SDFRKDFQFYKVREINNYHHAHDAYLNAVVGTALIKKYPKLESE |
| | | FVYGDYKVYDVRKMIAKSEQEIGKATAKYFFYSNIMNFFKTEITL |
| | | ANGEIRKRPLIETNGETGEIVWDKGRDFATVRKVLSMPQVNIVK |
| | | KTEVQTGGFSKESILPKRNSDKLIARKKDWDPKKYGGFDSPTVA |
| | | YSVLVVAKVEKGKSKKLKSVKELLGITIMERSSFEKNPIDFLEAK |
| | | GYKEVKKDLIIKLPKYSLFELENGRKRMLASAGELQKGNELALP |
| | | SKYVNFLYLASHYEKLKGSPEDNEQKQLFVEQHKHYLDEIIEQIS |
| | | EFSKRVILADANLDKVLSAYNKHRDKPIREQAENIIHLFTLTNLG |
| | | APAAFKYFDTTIDRKRYTSTKEVLDATLIHQSITGLYETRIDLSQL |
| | | GGDAYPYDVPDYASLGSGSPKKKRKVEDPKKKRKVDGIGSGSGPDI |
| | | VMTQSPSSLSASVGDRVTITCRSSTGAVTTSNYASWVQEKPGKLFKGLIGG |
| | | TNNRAPGVPSRFSGSLIGDKATLTISSLQPEDFATYFCALWYSNHWVFGQ |
| | | GTKVELKRGGGGSGGGGSGGGGSSGGGSEVKLLESGGGLVQPGGSLKL |
| | | SCAVSGFSLTDYGVNWVRQAPGRGLEWIGVIWGDGITDYNSALKDRFIIS |
| | | KDNGKNTVYLQMSKVRSDDTALYYCVTGLFDYWGQGTLVTVSSYPYDV |
| | | PDYAGGGGGSGGGGSGGGGSGGGGS* |
| 105 | KRAB- | MPAAKRVKLDGS<RTLVTFKDVFVDFTREEWKLLDTAQQIVYRN |
| | 1xGCN4 | VMLENYKNLVSLGYQLTKPDVILRLEKGEEP>GSGMEELLSKNYH |
| | | LENEVARLKKGSGSGGSGSGGSGSGSGGSGSGGSGSGGSG* |
| 106 | DNMT3A- | MPAAKRVKLDGSNHDQEFDPPKVYPPVPAEKRKPIRVLSLFDGIATG |
| | DNMT3L- | LLVLKDLGIQVDRYIASEVCEDSITVGMVRHQGKIMYVGDVRSVTQK |
| | 1xGCN4 | HIQEWGPFDLVIGGSPCNDLSIVNPARKGLYEGTGRLFFEFYRLLHD |
| | | ARPKEGDDRPFFWLFENVVAMGVSDKRDISRFLESNPVMIDAKEVS |
| | | AAHRARYFWGNLPGMNRPLASTVNDKLELQECLEHGRIAKFSKVRT |
| | | ITTRSNSIKQGKDQHFPVFMNEKEDILWCTEMERVFGFPVHYTDVS |
| | | NMSRLARQRLLGRSWSVPVIRHLFAPLKEYFACVSSGNSNANSRGPS |
| | | FSSGLVPLSLRGSHMGPMEIYKTVSAWKRQPVRVLSLFRNIDKVLKSL |
| | | GFLESGSGSGGGTLKYVEDVTNVVRRDVEKWGPFDLVYGSTQPLGS |
| | | SCDRCPGWYMFQFHRILQYALPRQESQRPFFWIFMDNLLLTEDDQE |
| | | TTTRFLQTEAVTLQDVRGRDYQNAMRVWSNIPGLKSKHAPLTPKEE |
| | | EYLQAQVRSRSKLDAPKVDLLVKNCLLPLREYFKYFSQNSLPLGGPSS |
| | | GAPPPSGGSPAGSPTSTEEGTSESATGSGSGGSGSGGSGSGSGGSGSG |
| | | GSGSGEELLSKNYHLENEVARLKKGSGSGGSGSGGSGSGSGGSGSGGS |
| | | GSGPKKKRKV* |
| 107 | scFv- | MPAAKRVKLDGSGPDIVMTQSPSSLSASVGDRVTITCRSSTGAVTTSNYA |
| | dCas9- | SWVQEKPGKLFKGLIGGTNNRAPGVPSRFSGSLIGDKATLTISSLQPEDF |
| | KRAB | ATYFCALWYSNHWVFGQGTKVELKRGGGGSGGGGSGGGGSSGGGSEV |
| | | KLLESGGGLVQPGGSLKLSCAVSGFSLTDYGVNWVRQAPGRGLEWIGVI |
| | | WGDGITDYNSALKDRFIISKDNGKNTVYLQMSKVRSDDTALYYCVTGLFD |
| | | YWGQGTLVTVSSYPYDVPDYAGGGGGSGGGGSGGGGSGGGGSGSGP |
| | | KKKRKVMDKKYSIGLAIGTNSVGWAVITDEYKVPSKKFKVLGNT |
| | | DRHSIKKNLIGALLFDSGETAEATRLKRTARRRYTRRKNRICYLQ |
| | | EIFSNEMAKVDDSFFHRLEESFLVEEDKKHERHPIFGNIVDEVAY |
| | | HEKYPTIYHLRKKLVDSTDKADLRLIYLALAHMIKFRGHFLIEGD |
| | | LNPDNSDVDKLFIQLVQTYNQLFEENPINASGVDAKAILSARLSKS |
| | | RRLENLIAQLPGEKKNGLFGNLIALSLGLTPNFKSNFDLAEDAKL |
| | | QLSKDTYDDDLDNLLAQIGDQYADLFLAAKNLSDAILLSDILRVN |
| | | TEITKAPLSASMIKRYDEHHQDLTLLKALVRQQLPEKYKEIFFDQ |
| | | SKNGYAGYIDGGASQEEFYKFIKPILEKMDGTEELLVKLNREDLL |
| | | RKQRTFDNGSIPHQIHLGELHAILRRQEDFYPFLKDNREKIEKILT |
| | | FRIPYYVGPLARGNSRFAWMTRKSEETITPWNFEEVVDKGASAQ |
| | | SFIERMTNFDKNLPNEKVLPKHSLLYEYFTVYNELTKVKYVTEG |
| | | MRKPAFLSGEQKKAIVDLLFKTNRKVTVKQLKEDYFKKIECFDS |
| | | VEISGVEDRFNASLGTYHDLLKIIKDKDFLDNEENEDILEDIVLTL |
| | | TLFEDREMIEERLKTYAHLFDDKVMKQLKRRRYTGWGRLSRKL |
| | | INGIRDKQSGKTILDFLKSDGFANRNFMQLIHDDSLTFKEDIQKA |
| | | QVSGQGDSLHEHIANLAGSPAIKKGILQTVKVVDELVKVMGRHK |
| | | PENIVIEMARENQTTQKGQKNSRERMKRIEEGIKELGSQILKEHP |
| | | VENTQLQNEKLYLYYLQNGRDMYVDQELDINRLSDYDVDAIVPQ |
| | | SFLKDDSIDNKVLTRSDKNRGKSDNVPSEEVVKKMKNYWRQLL |
| | | NAKLITQRKFDNLTKAERGGLSELDKAGFIKRQLVETRQITKHV |
| | | AQILDSRMNTKYDENDKLIREVKVITLKSKLVSDFRKDFQFYKVR |
| | | EINNYHHAHDAYLNAVVGTALIKKYPKLESEFVYGDYKVYDVRK |
| | | MIAKSEQEIGKATAKYFFYSNIMNFFKTEITLANGEIRKRPLIETN |
| | | GETGEIVWDKGRDFATVRKVLSMPQVNIVKKTEVQTGGFSKESI |
| | | LPKRNSDKLIARKKDWDPKKYGGFDSPTVAYSVLVVAKVEKGK |
| | | SKKLKSVKELLGITIMERSSFEKNPIDFLEAKGYKEVKKDLIIKLP |
| | | KYSLFELENGRKRMLASAGELQKGNELALPSKYVNFLYLASHYE |
| | | KLKGSPEDNEQKQLFVEQHKHYLDEIIEQISEFSKRVILADANLD |
| | | KVLSAYNKHRDKPIREQAENIIHLFTLTNLGAPAAFKYFDTTIDR |
| | | KRYTSTKEVLDATLIHQSITGLYETRIDLSQLGGDAYPYDVPDYA |
| | | SLGSGSPKKKRKVEDPKKKRKVDGSGSETPGTSESATPES<RTLVTF |
| | | KDVFVDFTREEWKLLDTAQQIVYRNVMLENYKNLVSLGYQLTK |
| | | PDVILRLEKGEEP>* |
| 108 | 1xGCN4- | MPAAKRVKLDGSGSGGSGSGEELLSKNYHLENEVARLKKGSGSGGSG |
| | DNMT3L- | SGGSGSGSGGSGSGGSGSGTPGTSEGGPSSGAPPPSGGSPAGSPTSTEE |
| | DNMT3A | GTSESATPESGPGTSTEPSEGSAPGSPAGSPTSTEEGTSTEPSEGSAPGT |
| | | STEPSESATPESMFETVPVWRRQPVRVLSLFEDIKKELTSLGFLESGS |
| | | DPGQLKHVVDVTDTVRKDVEEWGPFDLVYGATPPLGHTCDRPPSW |
| | | YLFQFHRLLQYARPKPGSPRPFFWMFVDNLVLNKEDLDVASRFLEM |
| | | EPVTIPDVHGGSLQNAVRVWSNIPAIRSSRHWALVSEEELSLLAQNK |
| | | QSSKLAAKWPTKLVKNCFLPLREYFKYFSTELTSSLSSGNSNANSRGP |
| | | SFSSGLVPLSLRGSHMNHDQEFDPPKVYPPVPAEKRKPIRVLSLFDGI |
| | | ATGLLVLKDLGIQVDRYIASEVCEDSITVGMVRHQGKIMYVGDVRSV |
| | | TQKHIQEWGPFDLVIGGSPCNDLSIVNPARKGLYEGTGRLFFEFYRL |
| | | LHDARPKEGDDRPFFWLFENVVAMGVSDKRDISRFLESNPVMIDAK |
| | | EVSAAHRARYFWGNLPGMNRPLASTVNDKLELQECLEHGRIAKFSK |
| | | VRTITTRSNSIKQGKDQHFPVFMNEKEDILWCTEMERVFGFPVHYT |
| | | DVSNMSRLARQRLLGRSWSVPVIRHLFAPLKEYFACV* |
| 109 | scFv- | MPAAKRVKLDGSGPDIVMTQSPSSLSASVGDRVTITCRSSTGAVTTSNYA |
| | dCas9- | SWVQEKPGKLFKGLIGGTNNRAPGVPSRFSGSLIGDKATLTISSLQPEDF |
| | HP1a | ATYFCALWYSNHWVFGQGTKVELKRGGGGSGGGGSGGGGSSGGGSEV |
| | | KLLESGGGLVQPGGSLKLSCAVSGFSLTDYGVNWVRQAPGRGLEWIGVI |
| | | WGDGITDYNSALKDRFIISKDNGKNTVYLQMSKVRSDDTALYYCVTGLFD |
| | | YWGQGTLVTVSSYPYDVPDYAGGGGGSGGGGSGGGGSGGGGSGSGP |
| | | KKKRKVMDKKYSIGLAIGTNSVGWAVITDEYKVPSKKFKVLGNT |
| | | DRHSIKKNLIGALLFDSGETAEATRLKRTARRRYTRRKNRICYLQ |
| | | EIFSNEMAKVDDSFFHRLEESFLVEEDKKHERHPIFGNIVDEVAY |
| | | HEKYPTIYHLRKKLVDSTDKADLRLIYLALAHMIKFRGHFLIEGD |
| | | LNPDNSDVDKLFIQLVQTYNQLFEENPINASGVDAKAILSARLSKS |
| | | RRLENLIAQLPGEKKNGLFGNLIALSLGLTPNFKSNFDLAEDAKL |
| | | QLSKDTYDDDLDNLLAQIGDQYADLFLAAKNLSDAILLSDILRVN |
| | | TEITKAPLSASMIKRYDEHHQDLTLLKALVRQQLPEKYKEIFFDQ |
| | | SKNGYAGYIDGGASQEEFYKFIKPILEKMDGTEELLVKLNREDLL |
| | | RKQRTFDNGSIPHQIHLGELHAILRRQEDFYPFLKDNREKIEKILT |
| | | FRIPYYVGPLARGNSRFAWMTRKSEETITPWNFEEVVDKGASAQ |
| | | SFIERMTNFDKNLPNEKVLPKHSLLYEYFTVYNELTKVKYVTEG |
| | | MRKPAFLSGEQKKAIVDLLFKTNRKVTVKQLKEDYFKKIECFDS |
| | | VEISGVEDRFNASLGTYHDLLKIIKDKDFLDNEENEDILEDIVLTL |
| | | TLFEDREMIEERLKTYAHLFDDKVMKQLKRRRYTGWGRLSRKL |
| | | INGIRDKQSGKTILDFLKSDGFANRNFMQLIHDDSLTFKEDIQKA |
| | | QVSGQGDSLHEHIANLAGSPAIKKGILQTVKVVDELVKVMGRHK |
| | | PENIVIEMARENQTTQKGQKNSRERMKRIEEGIKELGSQILKEHP |
| | | VENTQLQNEKLYLYYLQNGRDMYVDQELDINRLSDYDVDAIVPQ |
| | | SFLKDDSIDNKVLTRSDKNRGKSDNVPSEEVVKKMKNYWRQLL |
| | | NAKLITQRKFDNLTKAERGGLSELDKAGFIKRQLVETRQITKHV |
| | | AQILDSRMNTKYDENDKLIREVKVITLKSKLVSDFRKDFQFYKVR |
| | | EINNYHHAHDAYLNAVVGTALIKKYPKLESEFVYGDYKVYDVRK |
| | | MIAKSEQEIGKATAKYFFYSNIMNFFKTEITLANGEIRKRPLIETN |
| | | GETGEIVWDKGRDFATVRKVLSMPQVNIVKKTEVQTGGFSKESI |
| | | LPKRNSDKLIARKKDWDPKKYGGFDSPTVAYSVLVVAKVEKGK |
| | | SKKLKSVKELLGITIMERSSFEKNPIDFLEAKGYKEVKKDLIIKLP |
| | | KYSLFELENGRKRMLASAGELQKGNELALPSKYVNFLYLASHYE |
| | | KLKGSPEDNEQKQLFVEQHKHYLDEIIEQISEFSKRVILADANLD |
| | | KVLSAYNKHRDKPIREQAENIIHLFTLTNLGAPAAFKYFDTTIDR |
| | | KRYTSTKEVLDATLIHQSITGLYETRIDLSQLGGDAYPYDVPDYA |
| | | SLGSGSPKKKRKVEDPKKKRKVDGSGSETPGTSESATPESRTL<GKK |
| | | TKRTADSSSSEDEEEYVVEKVLDRRVVKGQVEYLLKWKGFSEEH |
| | | NTWEPEKNLDCPELISEFMKKYKKMKEGENNKPREKSESNKRK |
| | | SNFSNSADDIKSKKKREQSNDIARGFERGLEPEKIIGATDSCGDLM |
| | | FLMKWKDTDEADLVLAKEANVKCPQIVIAFYEERLTWHAYPED |
| | | AENKEKETAKSE>* |
| 110 | DNMT3A- | PAAKRVKLDGSNHDQEFDPPKVYPPVPAEKRKPIRVLSLFDGIATGL |
| | DNMT3L- | LVLKDLGIQVDRYIASEVCEDSITVGMVRHQGKIMYVGDVRSVTQKH |
| | dCas9- | IQEWGPFDLVIGGSPCNDLSIVNPARKGLYEGTGRLFFEFYRLLHDA |
| | 7xGFP11 | RPKEGDDRPFFWLFENVVAMGVSDKRDISRFLESNPVMIDAKEVSA |
| | | AHRARYFWGNLPGMNRPLASTVNDKLELQECLEHGRIAKFSKVRTI |
| | | TTRSNSIKQGKDQHFPVFMNEKEDILWCTEMERVFGFPVHYTDVSN |
| | | MSRLARQRLLGRSWSVPVIRHLFAPLKEYFACVSSGNSNANSRGPSF |
| | | SSGLVPLSLRGSHMGPMEIYKTVSAWKRQPVRVLSLFRNIDKVLKSL |
| | | GFLESGSGSGGGTLKYVEDVTNVVRRDVEKWGPFDLVYGSTQPLGS |
| | | SCDRCPGWYMFQFHRILQYALPRQESQRPFFWIFMDNLLLTEDDQE |
| | | TTTRFLQTEAVTLQDVRGRDYQNAMRVWSNIPGLKSKHAPLTPKEE |
| | | EYLQAQVRSRSKLDAPKVDLLVKNCLLPLREYFKYFSQNSLPLGGPSS |
| | | GAPPPSGGSPAGSPTSTEEGTSESATPESGPGTSTEPSEGSAPGSPAGSP |
| | | TSTEEGTSTEPSEGSAPGTSTEPSEPKKKRKVMDKKYSIGLAIGTNSV |
| | | GWAVITDEYKVPSKKFKVLGNTDRHSIKKNLIGALLFDSGETAE |
| | | ATRLKRTARRRYTRRKNRICYLQEIFSNEMAKVDDSFFHRLEESF |
| | | LVEEDKKHERHPIFGNIVDEVAYHEKYPTIYHLRKKLVDSTDKA |
| | | DLRLIYLALAHMIKFRGHFLIEGDLNPDNSDVDKLFIQLVQTYNQ |
| | | LFEENPINASGVDAKAILSARLSKSRRLENLIAQLPGEKKNGLFG |
| | | NLIALSLGLTPNFKSNFDLAEDAKLQLSKDTYDDDLDNLLAQIGD |
| | | QYADLFLAAKNLSDAILLSDILRVNTEITKAPLSASMIKRYDEHH |
| | | QDLTLLKALVRQQLPEKYKEIFFDQSKNGYAGYIDGGASQEEFY |
| | | KFIKPILEKMDGTEELLVKLNREDLLRKQRTFDNGSIPHQIHLGE |
| | | LHAILRRQEDFYPFLKDNREKIEKILTFRIPYYVGPLARGNSRFA |
| | | WMTRKSEETITPWNFEEVVDKGASAQSFIERMTNFDKNLPNEKV |
| | | LPKHSLLYEYFTVYNELTKVKYVTEGMRKPAFLSGEQKKAIVDL |
| | | LFKTNRKVTVKQLKEDYFKKIECFDSVEISGVEDRFNASLGTYHD |
| | | LLKIIKDKDFLDNEENEDILEDIVLTLTLFEDREMIEERLKTYAHL |
| | | FDDKVMKQLKRRRYTGWGRLSRKLINGIRDKQSGKTILDFLKSD |
| | | GFANRNFMQLIHDDSLTFKEDIQKAQVSGQGDSLHEHIANLAGSP |
| | | AIKKGILQTVKVVDELVKVMGRHKPENIVIEMARENQTTQKGQ |
| | | KNSRERMKRIEEGIKELGSQILKEHPVENTQLQNEKLYLYYLQN |
| | | GRDMYVDQELDINRLSDYDVDAIVPQSFLKDDSIDNKVLTRSDKN |
| | | RGKSDNVPSEEVVKKMKNYWRQLLNAKLITQRKFDNLTKAERG |
| | | GLSELDKAGFIKRQLVETRQITKHVAQILDSRMNTKYDENDKLIR |
| | | EVKVITLKSKLVSDFRKDFQFYKVREINNYHHAHDAYLNAVVGT |
| | | ALIKKYPKLESEFVYGDYKVYDVRKMIAKSEQEIGKATAKYFFY |
| | | SNIMNFFKTEITLANGEIRKRPLIETNGETGEIVWDKGRDFATVR |
| | | KVLSMPQVNIVKKTEVQTGGFSKESILPKRNSDKLIARKKDWDP |
| | | KKYGGFDSPTVAYSVLVVAKVEKGKSKKLKSVKELLGITIMERS |
| | | SFEKNPIDFLEAKGYKEVKKDLIIKLPKYSLFELENGRKRMLASA |
| | | GELQKGNELALPSKYVNFLYLASHYEKLKGSPEDNEQKQLFVEQ |
| | | HKHYLDEIIEQISEFSKRVILADANLDKVLSAYNKHRDKPIREQAE |
| | | NIIHLFTLTNLGAPAAFKYFDTTIDRKRYTSTKEVLDATLIHQSIT |
| | | GLYETRIDLSQLGGDAYPYDVPDYASLGSGSPKKKRKVEDPKKKR |
| | | KVDGSGSETPGTSESATPESGSGSNGSSGSMRDHMVLHEYVNAAGITG |
| | | GSGGRDHMVLHEYVNAAGITGGSGGRDHMVLHEYVNAAGITGGSGGR |
| | | DHMVLHEYVNAAGITGGSGGRDHMVLHEYVNAAGITGGSGGRDHMVL |
| | | HEYVNAAGITGGSGGRDHMVLHEYVNAAGITAAARSGSGQRGSKRTA |
| | | DGSEFESPKKKRKV* |
| 111 | GFP1- | MSKGEELFTGVVPILVELDGDVNGHKFSVRGEGEGDATIGKLTLKFICTT |
| | 10- | GKLPVPWPTLVTTLTYGVQCFSRYPDHMKRHDFFKSAMPEGYVQERTIS |
| | ZIM3 | FKDDGKYKTRAVVKFEGDTLVNRIELKGTDFKEDGNILGHKLEYNFNSH |
| | | NVYITADKQKNGIKANFTVRHNVEDGSVQLADHYQQNTPIGDGPVLLPD |
| | | NHYLSTQTVLSKDPNEKLDPGGGGSG<MNNSQGRVTFEDVTVNFTQ |
| | | GEWQRLNPEQRNLYRDVMLENYSNLVSVGQGETTKPDVILRLE |
| | | QGKEPWLEEEEVLGSGRAEKNGDIGGQIWKPKDVKESL>* |
| 112 | DNMT3A- | MPAAKRVKLDGSNHDQEFDPPKVYPPVPAEKRKPIRVLSLFDGIATG |
| | hDNMT3L- | LLVLKDLGIQVDRYIASEVCEDSITVGMVRHQGKIMYVGDVRSVTQK |
| | dCas9- | HIQEWGPFDLVIGGSPCNDLSIVNPARKGLYEGTGRLFFEFYRLLHD |
| | 1xGFP11 | ARPKEGDDRPFFWLFENVVAMGVSDKRDISRFLESNPVMIDAKEVS |
| | | AAHRARYFWGNLPGMNRPLASTVNDKLELQECLEHGRIAKFSKVRT |
| | | ITTRSNSIKQGKDQHFPVFMNEKEDILWCTEMERVFGFPVHYTDVS |
| | | NMSRLARQRLLGRSWSVPVIRHLFAPLKEYFACVSSGNSNANSRGPS |
| | | FSSGLVPLSLRGSHMFETVPVWRRQPVRVLSLFEDIKKELTSLGFLES |
| | | GSDPGQLKHVVDVTDTVRKDVEEWGPFDLVYGATPPLGHTCDRPPS |
| | | WYLFQFHRLLQYARPKPGSPRPFFWMFVDNLVLNKEDLDVASRFLE |
| | | MEPVTIPDVHGGSLQNAVRVWSNIPAIRSSRHWALVSEEELSLLAQN |
| | | KQSSKLAAKWPTKLVKNCFLPLREYFKYFSGGPSSGAPPPSGGSPAGS |
| | | PTSTEEGTSESATPESGPGTSTEPSEGSAPGSPAGSPTSTEEGTSTEPSE |
| | | GSAPGTSTEPSEPKKKRKVMDKKYSIGLAIGTNSVGWAVITDEYKV |
| | | PSKKFKVLGNTDRHSIKKNLIGALLFDSGETAEATRLKRTARRRY |
| | | TRRKNRICYLQEIFSNEMAKVDDSFFHRLEESFLVEEDKKHERHP |
| | | IFGNIVDEVAYHEKYPTIYHLRKKLVDSTDKADLRLIYLALAHMI |
| | | KFRGHFLIEGDLNPDNSDVDKLFIQLVQTYNQLFEENPINASGVD |
| | | AKAILSARLSKSRRLENLIAQLPGEKKNGLFGNLIALSLGLTPNFK |
| | | SNFDLAEDAKLQLSKDTYDDDLDNLLAQIGDQYADLFLAAKNLS |
| | | DAILLSDILRVNTEITKAPLSASMIKRYDEHHQDLTLLKALVRQQ |
| | | LPEKYKEIFFDQSKNGYAGYIDGGASQEEFYKFIKPILEKMDGTE |
| | | ELLVKLNREDLLRKQRTFDNGSIPHQIHLGELHAILRRQEDFYPF |
| | | LKDNREKIEKILTFRIPYYVGPLARGNSRFAWMTRKSEETITPWN |
| | | FEEVVDKGASAQSFIERMTNFDKNLPNEKVLPKHSLLYEYFTVY |
| | | NELTKVKYVTEGMRKPAFLSGEQKKAIVDLLFKTNRKVTVKQL |
| | | KEDYFKKIECFDSVEISGVEDRFNASLGTYHDLLKIIKDKDFLDNE |
| | | ENEDILEDIVLTLTLFEDREMIEERLKTYAHLFDDKVMKQLKRR |
| | | RYTGWGRLSRKLINGIRDKQSGKTILDFLKSDGFANRNFMQLIH |
| | | DDSLTFKEDIQKAQVSGQGDSLHEHIANLAGSPAIKKGILQTVKV |
| | | VDELVKVMGRHKPENIVIEMARENQTTQKGQKNSRERMKRIEE |
| | | GIKELGSQILKEHPVENTQLQNEKLYLYYLQNGRDMYVDQELDI |
| | | NRLSDYDVDAIVPQSFLKDDSIDNKVLTRSDKNRGKSDNVPSEEV |
| | | VKKMKNYWRQLLNAKLITQRKFDNLTKAERGGLSELDKAGFIK |
| | | RQLVETRQITKHVAQILDSRMNTKYDENDKLIREVKVITLKSKLV |
| | | SDFRKDFQFYKVREINNYHHAHDAYLNAVVGTALIKKYPKLESE |
| | | FVYGDYKVYDVRKMIAKSEQEIGKATAKYFFYSNIMNFFKTEITL |
| | | ANGEIRKRPLIETNGETGEIVWDKGRDFATVRKVLSMPQVNIVK |
| | | KTEVQTGGFSKESILPKRNSDKLIARKKDWDPKKYGGFDSPTVA |
| | | YSVLVVAKVEKGKSKKLKSVKELLGITIMERSSFEKNPIDFLEAK |
| | | GYKEVKKDLIIKLPKYSLFELENGRKRMLASAGELQKGNELALP |
| | | SKYVNFLYLASHYEKLKGSPEDNEQKQLFVEQHKHYLDEIIEQIS |
| | | EFSKRVILADANLDKVLSAYNKHRDKPIREQAENIIHLFTLTNLG |
| | | APAAFKYFDTTIDRKRYTSTKEVLDATLIHQSITGLYETRIDLSQL |
| | | GGDAYPYDVPDYASLGSGSPKKKRKVEDPKKKRKVDGSGSETPGTS |
| | | ESATPESGSGSNGSSGSMRDHMVLHEYVNAAGITAAARSGSGQRGSK |
| | | RTADGSEFESPKKKRKV* |
| 113 | GFP1- | MSKGEELFTGVVPILVELDGDVNGHKFSVRGEGEGDATIGKLTLKFICTT |
| | 10- | GKLPVPWPTLVTTLTYGVQCFSRYPDHMKRHDFFKSAMPEGYVQERTIS |
| | HDAC1 | FKDDGKYKTRAVVKFEGDTLVNRIELKGTDFKEDGNILGHKLEYNENSH |
| | | NVYITADKQKNGIKANFTVRHNVEDGSVQLADHYQQNTPIGDGPVLLPD |
| | | NHYLSTQTVLSKDPNEKLDPGGGGSG<MAQTQGTRRKVCYYYDGD |
| | | VGNYYYGQGHPMKPHRIRMTHNLLLNYGLYRKMEIYRPHKAN |
| | | AEEMTKYHSDDYIKFLRSIRPDNMSEYSKQMQRFNVGEDCPVFD |
| | | GLFEFCQLSTGGSVASAVKLNKQQTDIAVNWAGGLHHAKKSEA |
| | | SGFCYVNDIVLAILELLKYHQRVLYIDIDIHHGDGVEEAFYTTDR |
| | | VMTVSFHKYGEYFPGTGDLRDIGAGKGKYYAVNYPLRDGIDDES |
| | | YEAIFKPVMSKVMEMFQPSAVVLQCGSDSLSGDRLGCFNLTIKG |
| | | HAKCVEFVKSFNLPMLMLGGGGYTIRNVARCWTYETAVALDTE |
| | | IPNELPYNDYFEYFGPDFKLHISPSNMTNQNTNEYLEKIKQRLFE |
| | | NLRMLPHAPGVQMQAIPEDAIPEESGDEDEDDPDKRISICSSDKRI |
| | | ACEEEFSDSEEEGEGGRKNSSNFKKAKRVKTEDEKEKDPEEKKE |
| | | VTEEEKTKEEKPEAKGVKEEVKLA>* |
| 114 | DNMT3A- | MPAAKRVKLDGSNHDQEFDPPKVYPPVPAEKRKPIRVLSLFDGIATG |
| | hDNMT3L- | LLVLKDLGIQVDRYIASEVCEDSITVGMVRHQGKIMYVGDVRSVTQK |
| | dCas12a- | HIQEWGPFDLVIGGSPCNDLSIVNPARKGLYEGTGRLFFEFYRLLHD |
| | 1xGFP11 | ARPKEGDDRPFFWLFENVVAMGVSDKRDISRFLESNPVMIDAKEVS |
| | | AAHRARYFWGNLPGMNRPLASTVNDKLELQECLEHGRIAKFSKVRT |
| | | ITTRSNSIKQGKDQHFPVFMNEKEDILWCTEMERVFGFPVHYTDVS |
| | | NMSRLARQRLLGRSWSVPVIRHLFAPLKEYFACVSSGNSNANSRGPS |
| | | FSSGLVPLSLRGSHMFETVPVWRRQPVRVLSLFEDIKKELTSLGFLES |
| | | GSDPGQLKHVVDVTDTVRKDVEEWGPFDLVYGATPPLGHTCDRPPS |
| | | WYLFQFHRLLQYARPKPGSPRPFFWMFVDNLVLNKEDLDVASRFLE |
| | | MEPVTIPDVHGGSLQNAVRVWSNIPAIRSSRHWALVSEEELSLLAQN |
| | | KQSSKLAAKWPTKLVKNCFLPLREYFKYFSGGPSSGAPPPSGGSPAGS |
| | | PTSTEEGTSESATPESGPGTSTEPSEGSAPGSPAGSPTSTEEGTSTEPSE |
| | | GSAPGTSTEPSEPKKKRKVMSKLEKFTNCYSLSKTLRFKAIPVGKT |
| | | QENIDNKRLLVEDEKRAEDYKGVKKLLDRYYLSFINDVLHSIKL |
| | | KNLNNYISLFRKKTRTEKENKELENLEINLRKEIAKAFKGNEGYK |
| | | SLFKKDIIETILPEFLDDKDEIALVNSFNGFTTAFTGFFDNRENMFS |
| | | EEAKSTSIAFRCINENLTRYISNMDIFEKVDAIFDKHEVQEIKEKIL |
| | | NSDYDVEDFFEGEFFNFVLTQEGIDVYNAIIGGFVTESGEKIKGLN |
| | | EYINLYNQKTKQKLPKFKPLYKQVLSDRESLSFYGEGYTSDEEVL |
| | | EVFRNTLNKNSEIFSSIKKLEKLFKNFDEYSSAGIFVKNGPAISTIS |
| | | KDIFGEWNVIRDKWNAEYDDIHLKKKAVVTEKYEDDRRKSFKKI |
| | | GSFSLEQLQEYADADLSVVEKLKEIIIQKVDEIYKVYGSSEKLFDA |
| | | DFVLEKSLKKNDAVVAIMKDLLDSVKSFENYIKAFFGEGKETNR |
| | | DESFYGDFVLAYDILLKVDHIYDAIRNYVTQKPYSKDKFKLYFQN |
| | | PQFMGGWDKDKETDYRATILRYGSKYYLAIMDKKYAKCLQKID |
| | | KDDVNGNYEKINYKLLPGPNKMLPKVFFSKKWMAYYNPSEDIQ |
| | | KIYKNGTFKKGDMFNLNDCHKLIDFFKDSISRYPKWSNAYDFNFS |
| | | ETEKYKDIAGFYREVEEQGYKVSFESASKKEVDKLVEEGKLYMF |
| | | QIYNKDFSDKSHGTPNLHTMYFKLLFDENNHGQIRLSGGAELFM |
| | | RRASLKKEELVVHPANSPIANKNPDNPKKTTTLSYDVYKDKRFSE |
| | | DQYELHIPIAINKCPKNIFKINTEVRVLLKHDDNPYVIGIARGERN |
| | | LLYIVVVDGKGNIVEQYSLNEIINNFNGIRIKTDYHSLLDKKEKER |
| | | FEARQNWTSIENIKELKAGYISQVVHKICELVEKYDAVIALADLN |
| | | SGFKNSRVKVEKQVYQKFEKMLIDKLNYMVDKKSNPCATGGAL |
| | | KGYQITNKFESFKSMSTQNGFIFYIPAWLTSKIDPSTGFVNLLKTK |
| | | YTSIADSKKFISSFDRIMYVPEEDLFEFALDYKNFSRTDADYIKKW |
| | | KLYSYGNRIRIFRNPKKNNVFDWEEVCLTSAYKELFNKYGINYQ |
| | | QGDIRALLCEQSDKAFYSSFMALMSLMLQMRNSITGRTDVAFLIS |
| | | PVKNSDGIFYDSRNYEAQENAILPKNADANGAYNIARKVLWAIG |
| | | QFKKAEDEKLDKVKIAISNKEWLEYAQTSVKHAYPYDVPDYASL |
| | | GSGSPKKKRKVEDPKKKRKVDGSGSETPGTSESATPESGSGSNGSSG |
| | | SMRDHMVLHEYVNAAGITAAARSGSGQRGSKRTADGSEFESPKKKRK |
| | | V* |
| 115 | DNMT3A- | MPAAKRVKLDGSNHDQEFDPPKVYPPVPAEKRKPIRVLSLFDGIATG |
| | hDNMT3L- | LLVLKDLGIQVDRYIASEVCEDSITVGMVRHQGKIMYVGDVRSVTQK |
| | dCas12i- | HIQEWGPFDLVIGGSPCNDLSIVNPARKGLYEGTGRLFFEFYRLLHD |
| | 1xGFP11 | ARPKEGDDRPFFWLFENVVAMGVSDKRDISRFLESNPVMIDAKEVS |
| | | AAHRARYFWGNLPGMNRPLASTVNDKLELQECLEHGRIAKFSKVRT |
| | | ITTRSNSIKQGKDQHFPVFMNEKEDILWCTEMERVFGFPVHYTDVS |
| | | NMSRLARQRLLGRSWSVPVIRHLFAPLKEYFACVSSGNSNANSRGPS |
| | | FSSGLVPLSLRGSHMFETVPVWRRQPVRVLSLFEDIKKELTSLGFLES |
| | | GSDPGQLKHVVDVTDTVRKDVEEWGPFDLVYGATPPLGHTCDRPPS |
| | | WYLFQFHRLLQYARPKPGSPRPFFWMFVDNLVLNKEDLDVASRFLE |
| | | MEPVTIPDVHGGSLQNAVRVWSNIPAIRSSRHWALVSEEELSLLAQN |
| | | KQSSKLAAKWPTKLVKNCFLPLREYFKYFSGGPSSGAPPPSGGSPAGS |
| | | PTSTEEGTSESATPESGPGTSTEPSEGSAPGSPAGSPTSTEEGTSTEPSE |
| | | GSAPGTSTEPSEPKKKRKVMGITMSDTTFRPYKSKLNPNERKMPM |
| | | VVDTMNWCDNACSVFFDLFVGLYGGVKIGDVTNFLTEKQDTTT |
| | | DADLLCAINWFRAMPVSNPDAVVGPEQLVVRFRDYSGHNPSPMA |
| | | SMYLSAPVNPRYTWVDCRFLYQQMCQTLGANLDVDISTLVQTG |
| | | LLPIQKDTQLNAYSFCSNVFGEGVKEDPSAKVTSYTAAANALSGA |
| | | TNPIITYEDYRQILSSAITNRPSRKGAKDILAADLDSTKTGVLPGN |
| | | YVSQRIAMYQASAASKARGVVLPNRLRVKAYLQNLVGLNYICTT |
| | | WAAPMLRAVGDIKSKNSNNYRFVGERLERQQEIDNLLAVSNIRS |
| | | AQAILQQFRANESNQFYIKKRHIGKGLPSLYDMWDLMDEKEGID |
| | | NYIQSLKGDKTERLPIRELLQIIYPHRKSVSAELFLSAAELTDVED |
| | | RQNRCMVHPTVRGSLVINFGKSSTIFGAITPPDTLIKFRGEMVPA |
| | | GQTGMIWFTMHLVDGGKWVKHHIPCHSSRYFEEIYAWKKDLPT |
| | | LPFPRRSLYGYAIGNKISDTRKIDLRRKKASKQYLRTLENMTHNV |
| | | EFDPTTQFMVDQELNVTITARVKKIPPVRDVPVGSRIMGLNKNQ |
| | | TIRDCYSIWERVEANTSGSFQHPVVQDVWLRLVADGHVTSTVNG |
| | | PNGQIDQMSYSGPDVANCGNWMQERSNFITSVDDADQSIMKHFL |
| | | WNNRVKLYAWNCVYAGTLMKAISKQMTTANRNLFRNEILSFVG |
| | | GRFGCRLGSLAQVSLDLLRRMKSVISCYFSRNNAFTIEERSAFDK |
| | | ELMELFESLDNKMNNKRKEKVNRTLSSIFQVAKQHNVVRLVVT |
| | | KNLQTPDANVRSVMNQRSVDWCARKIEEKIVDLGNVIGIYVDLV |
| | | EALDLSHLDPFIYIAKGDVGKECQFDEVESSSLLPIHTSMFRDWH |
| | | GLVNKGRTTTPIYHSALRSFASHYGLRFDDLARIKAAELAKMLP |
| | | DQKVFIPHRGGRFFMSTYPVTSTSRPVSYDGRQRFLNSGDMVAP |
| | | VNTMLRGFRRARSAYPYDVPDYASLGSGSPKKKRKVEDPKKKRKV |
| | | DGSGSETPGTSESATPESGSGSNGSSGSMRDHMVLHEYVNAAGITAAA |
| | | RSGSGQRGSKRTADGSEFESPKKKRKV* |
| 116 | DNMT3A- | MPAAKRVKLDGSNHDQEFDPPKVYPPVPAEKRKPIRVLSLFDGIATG |
| | DNMT3L- | LLVLKDLGIQVDRYIASEVCEDSITVGMVRHQGKIMYVGDVRSVTQK |
| | GFP1- | HIQEWGPFDLVIGGSPCNDLSIVNPARKGLYEGTGRLFFEFYRLLHD |
| | 10 | ARPKEGDDRPFFWLFENVVAMGVSDKRDISRFLESNPVMIDAKEVS |
| | | AAHRARYFWGNLPGMNRPLASTVNDKLELQECLEHGRIAKFSKVRT |
| | | ITTRSNSIKQGKDQHFPVFMNEKEDILWCTEMERVFGFPVHYTDVS |
| | | NMSRLARQRLLGRSWSVPVIRHLFAPLKEYFACVSSGNSNANSRGPS |
| | | FSSGLVPLSLRGSHMGPMEIYKTVSAWKRQPVRVLSLFRNIDKVLKSL |
| | | GFLESGSGSGGGTLKYVEDVTNVVRRDVEKWGPFDLVYGSTQPLGS |
| | | SCDRCPGWYMFQFHRILQYALPRQESQRPFFWIFMDNLLLTEDDQE |
| | | TTTRFLQTEAVTLQDVRGRDYQNAMRVWSNIPGLKSKHAPLTPKEE |
| | | EYLQAQVRSRSKLDAPKVDLLVKNCLLPLREYFKYFSQNSLPLGGPSS |
| | | GAPPPSGGSPAGSPTSTEEGTSESATMSKGEELFTGVVPILVELDGDVN |
| | | GHKFSVRGEGEGDATIGKLTLKFICTTGKLPVPWPTLVTTLTYGVQCFSR |
| | | YPDHMKRHDFFKSAMPEGYVQERTISFKDDGKYKTRAVVKFEGDTLVN |
| | | RIELKGTDFKEDGNILGHKLEYNFNSHNVYITADKQKNGIKANFTVRHNV |
| | | EDGSVQLADHYQQNTPIGDGPVLLPDNHYLSTQTVLSKDPNEK* |
| 117 | 1xGFP11- | MPAAKRVKLDGSGPDIVIGSGGRDHMVLHEYVNAAGITAAARSGSGQ |
| | dCas9- | RGSKRTADGSEFESPKKKRKVGGSGSGPKKKRKVMDKKYSIGLAIG |
| | KRAB | TNSVGWAVITDEYKVPSKKFKVLGNTDRHSIKKNLIGALLFDSGE |
| | | TAEATRLKRTARRRYTRRKNRICYLQEIFSNEMAKVDDSFFHRL |
| | | EESFLVEEDKKHERHPIFGNIVDEVAYHEKYPTIYHLRKKLVDST |
| | | DKADLRLIYLALAHMIKFRGHFLIEGDLNPDNSDVDKLFIQLVQT |
| | | YNQLFEENPINASGVDAKAILSARLSKSRRLENLIAQLPGEKKNG |
| | | LFGNLIALSLGLTPNFKSNFDLAEDAKLQLSKDTYDDDLDNLLAQ |
| | | IGDQYADLFLAAKNLSDAILLSDILRVNTEITKAPLSASMIKRYDE |
| | | HHQDLTLLKALVRQQLPEKYKEIFFDQSKNGYAGYIDGGASQEE |
| | | FYKFIKPILEKMDGTEELLVKLNREDLLRKQRTFDNGSIPHQIHL |
| | | GELHAILRRQEDFYPFLKDNREKIEKILTFRIPYYVGPLARGNSRF |
| | | AWMTRKSEETITPWNFEEVVDKGASAQSFIERMTNFDKNLPNEK |
| | | VLPKHSLLYEYFTVYNELTKVKYVTEGMRKPAFLSGEQKKAIVD |
| | | LLFKTNRKVTVKQLKEDYFKKIECFDSVEISGVEDRFNASLGTYH |
| | | DLLKIIKDKDFLDNEENEDILEDIVLTLTLFEDREMIEERLKTYAH |
| | | LFDDKVMKQLKRRRYTGWGRLSRKLINGIRDKQSGKTILDFLKS |
| | | DGFANRNFMQLIHDDSLTFKEDIQKAQVSGQGDSLHEHIANLAG |
| | | SPAIKKGILQTVKVVDELVKVMGRHKPENIVIEMARENQTTQKG |
| | | QKNSRERMKRIEEGIKELGSQILKEHPVENTQLQNEKLYLYYLQ |
| | | NGRDMYVDQELDINRLSDYDVDAIVPQSFLKDDSIDNKVLTRSDK |
| | | NRGKSDNVPSEEVVKKMKNYWRQLLNAKLITQRKFDNLTKAER |
| | | GGLSELDKAGFIKRQLVETRQITKHVAQILDSRMNTKYDENDKL |
| | | IREVKVITLKSKLVSDFRKDFQFYKVREINNYHHAHDAYLNAVV |
| | | GTALIKKYPKLESEFVYGDYKVYDVRKMIAKSEQEIGKATAKYF |
| | | FYSNIMNFFKTEITLANGEIRKRPLIETNGETGEIVWDKGRDFAT |
| | | VRKVLSMPQVNIVKKTEVQTGGFSKESILPKRNSDKLIARKKDW |
| | | DPKKYGGFDSPTVAYSVLVVAKVEKGKSKKLKSVKELLGITIME |
| | | RSSFEKNPIDFLEAKGYKEVKKDLIIKLPKYSLFELENGRKRMLA |
| | | SAGELQKGNELALPSKYVNFLYLASHYEKLKGSPEDNEQKQLFV |
| | | EQHKHYLDEIIEQISEFSKRVILADANLDKVLSAYNKHRDKPIREQ |
| | | AENIIHLFTLTNLGAPAAFKYFDTTIDRKRYTSTKEVLDATLIHQS |
| | | ITGLYETRIDLSQLGGDAYPYDVPDYASLGSGSPKKKRKVEDPKKK |
| | | RKVDGSGSETPGTSESATPES<RTLVTFKDVFVDFTREEWKLLDTA |
| | | QQIVYRNVMLENYKNLVSLGYQLTKPDVILRLEKGEEP>* |
| 118 | 7xGFP11- | MPAAKRVKLDGSMRDHMVLHEYVNAAGITGGSGGRDHMVLHEYVNA |
| | dCas9- | AGITGGSGGRDHMVLHEYVNAAGITGGSGGRDHMVLHEYVNAAGITGG |
| | ZIM3 | SGGRDHMVLHEYVNAAGITGGSGGRDHMVLHEYVNAAGITGGSGGRD |
| | | HMVLHEYVNAAGITAAARSGSGQRGSKRTADGSEFESPKKKRKVGGS |
| | | GSGPKKKRKVMDKKYSIGLAIGTNSVGWAVITDEYKVPSKKFKV |
| | | LGNTDRHSIKKNLIGALLFDSGETAEATRLKRTARRRYTRRKNRI |
| | | CYLQEIFSNEMAKVDDSFFHRLEESFLVEEDKKHERHPIFGNIVD |
| | | EVAYHEKYPTIYHLRKKLVDSTDKADLRLIYLALAHMIKFRGHF |
| | | LIEGDLNPDNSDVDKLFIQLVQTYNQLFEENPINASGVDAKAILSA |
| | | RLSKSRRLENLIAQLPGEKKNGLFGNLIALSLGLTPNFKSNFDLA |
| | | EDAKLQLSKDTYDDDLDNLLAQIGDQYADLFLAAKNLSDAILLSD |
| | | ILRVNTEITKAPLSASMIKRYDEHHQDLTLLKALVRQQLPEKYKE |
| | | IFFDQSKNGYAGYIDGGASQEEFYKFIKPILEKMDGTEELLVKLN |
| | | REDLLRKQRTFDNGSIPHQIHLGELHAILRRQEDFYPFLKDNREK |
| | | IEKILTFRIPYYVGPLARGNSRFAWMTRKSEETITPWNFEEVVDK |
| | | GASAQSFIERMTNFDKNLPNEKVLPKHSLLYEYFTVYNELTKVK |
| | | YVTEGMRKPAFLSGEQKKAIVDLLFKTNRKVTVKQLKEDYFKKI |
| | | ECFDSVEISGVEDRFNASLGTYHDLLKIIKDKDFLDNEENEDILED |
| | | IVLTLTLFEDREMIEERLKTYAHLFDDKVMKQLKRRRYTGWGR |
| | | LSRKLINGIRDKQSGKTILDFLKSDGFANRNFMQLIHDDSLTFKE |
| | | DIQKAQVSGQGDSLHEHIANLAGSPAIKKGILQTVKVVDELVKV |
| | | MGRHKPENIVIEMARENQTTQKGQKNSRERMKRIEEGIKELGSQ |
| | | ILKEHPVENTQLQNEKLYLYYLQNGRDMYVDQELDINRLSDYDV |
| | | DAIVPQSFLKDDSIDNKVLTRSDKNRGKSDNVPSEEVVKKMKNY |
| | | WRQLLNAKLITQRKFDNLTKAERGGLSELDKAGFIKRQLVETRQ |
| | | ITKHVAQILDSRMNTKYDENDKLIREVKVITLKSKLVSDFRKDFQ |
| | | FYKVREINNYHHAHDAYLNAVVGTALIKKYPKLESEFVYGDYKV |
| | | YDVRKMIAKSEQEIGKATAKYFFYSNIMNFFKTEITLANGEIRKR |
| | | PLIETNGETGEIVWDKGRDFATVRKVLSMPQVNIVKKTEVQTGG |
| | | FSKESILPKRNSDKLIARKKDWDPKKYGGFDSPTVAYSVLVVAK |
| | | VEKGKSKKLKSVKELLGITIMERSSFEKNPIDFLEAKGYKEVKKD |
| | | LIIKLPKYSLFELENGRKRMLASAGELQKGNELALPSKYVNFLYL |
| | | ASHYEKLKGSPEDNEQKQLFVEQHKHYLDEIIEQISEFSKRVILA |
| | | DANLDKVLSAYNKHRDKPIREQAENIIHLFTLTNLGAPAAFKYFD |
| | | TTIDRKRYTSTKEVLDATLIHQSITGLYETRIDLSQLGGDAYPYDV |
| | | PDYASLGSGSPKKKRKVEDPKKKRKVDGSGSETPGTSESATPES<MN |
| | | NSQGRVTFEDVTVNFTQGEWQRLNPEQRNLYRDVMLENYSNLV |
| | | SVGQGETTKPDVILRLEQGKEPWLEEEEVLGSGRAEKNGDIGGQ |
| | | IWKPKDVKESL>* |
| 119 | DNMT3A- | MPAAKRVKLDGSNHDQEFDPPKVYPPVPAEKRKPIRVLSLEDGIATG |
| | hDNMT3L- | LLVLKDLGIQVDRYIASEVCEDSITVGMVRHQGKIMYVGDVRSVTQK |
| | GFP1- | HIQEWGPFDLVIGGSPCNDLSIVNPARKGLYEGTGRLFFEFYRLLHD |
| | 10 | ARPKEGDDRPFFWLFENVVAMGVSDKRDISRFLESNPVMIDAKEVS |
| | | AAHRARYFWGNLPGMNRPLASTVNDKLELQECLEHGRIAKFSKVRT |
| | | ITTRSNSIKQGKDQHFPVFMNEKEDILWCTEMERVFGFPVHYTDVS |
| | | NMSRLARQRLLGRSWSVPVIRHLFAPLKEYFACVSSGNSNANSRGPS |
| | | FSSGLVPLSLRGSHMFETVPVWRRQPVRVLSLFEDIKKELTSLGFLES |
| | | GSDPGQLKHVVDVTDTVRKDVEEWGPFDLVYGATPPLGHTCDRPPS |
| | | WYLFQFHRLLQYARPKPGSPRPFFWMFVDNLVLNKEDLDVASRFLE |
| | | MEPVTIPDVHGGSLQNAVRVWSNIPAIRSSRHWALVSEEELSLLAQN |
| | | KQSSKLAAKWPTKLVKNCFLPLREYFKYFSGGPSSGAPPPSGGSPAGS |
| | | PTSTEEGTSESATPESGPGTSTEPSEGSAPGSPAGSPTSTEEGTSTEPSE |
| | | GSAPGTSTEPSEPKKKRKVPSEMSKGEELFTGVVPILVELDGDVNGHK |
| | | FSVRGEGEGDATIGKLTLKFICTTGKLPVPWPTLVTTLTYGVQCFSRYPD |
| | | HMKRHDFFKSAMPEGYVQERTISFKDDGKYKTRAVVKFEGDTLVNRIEL |
| | | KGTDFKEDGNILGHKLEYNFNSHNVYITADKQKNGIKANFTVRHNVEDG |
| | | SVQLADHYQQNTPIGDGPVLLPDNHYLSTQTVLSKDPNEK* |
| 120 | DNMT3A- | MPAAKRVKLDGSNHDQEFDPPKVYPPVPAEKRKPIRVLSLFDGIATG |
| | DNMT3L- | LLVLKDLGIQVDRYIASEVCEDSITVGMVRHQGKIMYVGDVRSVTQK |
| | 1xGFP11 | HIQEWGPFDLVIGGSPCNDLSIVNPARKGLYEGTGRLFFEFYRLLHD |
| | | ARPKEGDDRPFFWLFENVVAMGVSDKRDISRFLESNPVMIDAKEVS |
| | | AAHRARYFWGNLPGMNRPLASTVNDKLELQECLEHGRIAKFSKVRT |
| | | ITTRSNSIKQGKDQHFPVFMNEKEDILWCTEMERVFGFPVHYTDVS |
| | | NMSRLARQRLLGRSWSVPVIRHLFAPLKEYFACVSSGNSNANSRGPS |
| | | FSSGLVPLSLRGSHMGPMEIYKTVSAWKRQPVRVLSLFRNIDKVLKSL |
| | | GFLESGSGSGGGTLKYVEDVTNVVRRDVEKWGPFDLVYGSTQPLGS |
| | | SCDRCPGWYMFQFHRILQYALPRQESQRPFFWIFMDNLLLTEDDQE |
| | | TTTRFLQTEAVTLQDVRGRDYQNAMRVWSNIPGLKSKHAPLTPKEE |
| | | EYLQAQVRSRSKLDAPKVDLLVKNCLLPLREYFKYFSQNSLPLGGPSS |
| | | GAPPPSGGSPAGSPTSTEEGTSESATGGSGGRDHMVLHEYVNAAGITA |
| | | AARSGSGQRGSKRTADGSEFESPKKKRKV* |
| 121 | GFP1- | MPAAKRVKLDGSGPDIVMSKGEELFTGVVPILVELDGDVNGHKFSVRG |
| | 10- | EGEGDATIGKLTLKFICTTGKLPVPWPTLVTTLTYGVQCFSRYPDHMKRH |
| | dCas9- | DFFKSAMPEGYVQERTISFKDDGKYKTRAVVKFEGDTLVNRIELKGTDF |
| | KRAB | KEDGNILGHKLEYNFNSHNVYITADKQKNGIKANFTVRHNVEDGSVQLA |
| | | DHYQQNTPIGDGPVLLPDNHYLSTQTVLSKDPNEKLDPGGGGSGSGPK |
| | | KKRKVMDKKYSIGLAIGTNSVGWAVITDEYKVPSKKFKVLGNTD |
| | | RHSIKKNLIGALLFDSGETAEATRLKRTARRRYTRRKNRICYLQE |
| | | IFSNEMAKVDDSFFHRLEESFLVEEDKKHERHPIFGNIVDEVAYH |
| | | EKYPTIYHLRKKLVDSTDKADLRLIYLALAHMIKFRGHFLIEGDL |
| | | NPDNSDVDKLFIQLVQTYNQLFEENPINASGVDAKAILSARLSKSR |
| | | RLENLIAQLPGEKKNGLFGNLIALSLGLTPNFKSNFDLAEDAKLQ |
| | | LSKDTYDDDLDNLLAQIGDQYADLFLAAKNLSDAILLSDILRVNT |
| | | EITKAPLSASMIKRYDEHHQDLTLLKALVRQQLPEKYKEIFFDQS |
| | | KNGYAGYIDGGASQEEFYKFIKPILEKMDGTEELLVKLNREDLL |
| | | RKQRTFDNGSIPHQIHLGELHAILRRQEDFYPFLKDNREKIEKILT |
| | | FRIPYYVGPLARGNSRFAWMTRKSEETITPWNFEEVVDKGASAQ |
| | | SFIERMTNFDKNLPNEKVLPKHSLLYEYFTVYNELTKVKYVTEG |
| | | MRKPAFLSGEQKKAIVDLLFKTNRKVTVKQLKEDYFKKIECFDS |
| | | VEISGVEDRFNASLGTYHDLLKIIKDKDFLDNEENEDILEDIVLTL |
| | | TLFEDREMIEERLKTYAHLFDDKVMKQLKRRRYTGWGRLSRKL |
| | | INGIRDKQSGKTILDFLKSDGFANRNFMQLIHDDSLTFKEDIQKA |
| | | QVSGQGDSLHEHIANLAGSPAIKKGILQTVKVVDELVKVMGRHK |
| | | PENIVIEMARENQTTQKGQKNSRERMKRIEEGIKELGSQILKEHP |
| | | VENTQLQNEKLYLYYLQNGRDMYVDQELDINRLSDYDVDAIVPQ |
| | | SFLKDDSIDNKVLTRSDKNRGKSDNVPSEEVVKKMKNYWRQLL |
| | | NAKLITQRKFDNLTKAERGGLSELDKAGFIKRQLVETRQITKHV |
| | | AQILDSRMNTKYDENDKLIREVKVITLKSKLVSDFRKDFQFYKVR |
| | | EINNYHHAHDAYLNAVVGTALIKKYPKLESEFVYGDYKVYDVRK |
| | | MIAKSEQEIGKATAKYFFYSNIMNFFKTEITLANGEIRKRPLIETN |
| | | GETGEIVWDKGRDFATVRKVLSMPQVNIVKKTEVQTGGFSKESI |
| | | LPKRNSDKLIARKKDWDPKKYGGFDSPTVAYSVLVVAKVEKGK |
| | | SKKLKSVKELLGITIMERSSFEKNPIDFLEAKGYKEVKKDLIIKLP |
| | | KYSLFELENGRKRMLASAGELQKGNELALPSKYVNFLYLASHYE |
| | | KLKGSPEDNEQKQLFVEQHKHYLDEIIEQISEFSKRVILADANLD |
| | | KVLSAYNKHRDKPIREQAENIIHLFTLTNLGAPAAFKYFDTTIDR |
| | | KRYTSTKEVLDATLIHQSITGLYETRIDLSQLGGDAYPYDVPDYA |
| | | SLGSGSPKKKRKVEDPKKKRKVDGSGSETPGTSESATPES<RTLVTF |
| | | KDVFVDFTREEWKLLDTAQQIVYRNVMLENYKNLVSLGYQLTK |
| | | PDVILRLEKGEEP>* |
| 122 | 10xGFP11- | MPAAKRVKLDGSMRDHMVLHEYVNAAGITGGSGGRDHMVLHEYVNA |
| | dCas9- | AGITGGSGGRDHMVLHEYVNAAGITGGSGGRDHMVLHEYVNAAGITGG |
| | ZIM3 | SGGRDHMVLHEYVNAAGITGGSGGRDHMVLHEYVNAAGITGGSGGRD |
| | | HMVLHEYVNAAGITAAAGGSGGRDHMVLHEYVNAAGITGGSGGRDHM |
| | | VLHEYVNAAGITGGSGGRDHMVLHEYVNAAGITGGSGGRSGSGQRGSK |
| | | RTADGSEFESPKKKRKVGGSGSGPKKKRKVMDKKYSIGLAIGTNSV |
| | | GWAVITDEYKVPSKKFKVLGNTDRHSIKKNLIGALLFDSGETAE |
| | | ATRLKRTARRRYTRRKNRICYLQEIFSNEMAKVDDSFFHRLEESF |
| | | LVEEDKKHERHPIFGNIVDEVAYHEKYPTIYHLRKKLVDSTDKA |
| | | DLRLIYLALAHMIKFRGHFLIEGDLNPDNSDVDKLFIQLVQTYNQ |
| | | LFEENPINASGVDAKAILSARLSKSRRLENLIAQLPGEKKNGLFG |
| | | NLIALSLGLTPNFKSNFDLAEDAKLQLSKDTYDDDLDNLLAQIGD |
| | | QYADLFLAAKNLSDAILLSDILRVNTEITKAPLSASMIKRYDEHH |
| | | QDLTLLKALVRQQLPEKYKEIFFDQSKNGYAGYIDGGASQEEFY |
| | | KFIKPILEKMDGTEELLVKLNREDLLRKQRTFDNGSIPHQIHLGE |
| | | LHAILRRQEDFYPFLKDNREKIEKILTFRIPYYVGPLARGNSRFA |
| | | WMTRKSEETITPWNFEEVVDKGASAQSFIERMTNFDKNLPNEKV |
| | | LPKHSLLYEYFTVYNELTKVKYVTEGMRKPAFLSGEQKKAIVDL |
| | | LFKTNRKVTVKQLKEDYFKKIECFDSVEISGVEDRFNASLGTYHD |
| | | LLKIIKDKDFLDNEENEDILEDIVLTLTLFEDREMIEERLKTYAHL |
| | | FDDKVMKQLKRRRYTGWGRLSRKLINGIRDKQSGKTILDFLKSD |
| | | GFANRNFMQLIHDDSLTFKEDIQKAQVSGQGDSLHEHIANLAGSP |
| | | AIKKGILQTVKVVDELVKVMGRHKPENIVIEMARENQTTQKGQ |
| | | KNSRERMKRIEEGIKELGSQILKEHPVENTQLQNEKLYLYYLQN |
| | | GRDMYVDQELDINRLSDYDVDAIVPQSFLKDDSIDNKVLTRSDKN |
| | | RGKSDNVPSEEVVKKMKNYWRQLLNAKLITQRKFDNLTKAERG |
| | | GLSELDKAGFIKRQLVETRQITKHVAQILDSRMNTKYDENDKLIR |
| | | EVKVITLKSKLVSDFRKDFQFYKVREINNYHHAHDAYLNAVVGT |
| | | ALIKKYPKLESEFVYGDYKVYDVRKMIAKSEQEIGKATAKYFFY |
| | | SNIMNFFKTEITLANGEIRKRPLIETNGETGEIVWDKGRDFATVR |
| | | KVLSMPQVNIVKKTEVQTGGFSKESILPKRNSDKLIARKKDWDP |
| | | KKYGGFDSPTVAYSVLVVAKVEKGKSKKLKSVKELLGITIMERS |
| | | SFEKNPIDFLEAKGYKEVKKDLIIKLPKYSLFELENGRKRMLASA |
| | | GELQKGNELALPSKYVNFLYLASHYEKLKGSPEDNEQKQLFVEQ |
| | | HKHYLDEIIEQISEFSKRVILADANLDKVLSAYNKHRDKPIREQAE |
| | | NIIHLFTLTNLGAPAAFKYFDTTIDRKRYTSTKEVLDATLIHQSIT |
| | | GLYETRIDLSQLGGDAYPYDVPDYASLGSGSPKKKRKVEDPKKKR |
| | | KVDGSGSETPGTSESATPES<MNNSQGRVTFEDVTVNFTQGEWQR |
| | | LNPEQRNLYRDVMLENYSNLVSVGQGETTKPDVILRLEQGKEP |
| | | WLEEEEVLGSGRAEKNGDIGGQIWKPKDVKESL>* |
| 123 | scFv- | MVPAAKRVKLDGSGPDIVMTQSPSSLSASVGDRVTITCRSSTGAVTTSNY |
| | ZIM3 | ASWVQEKPGKLFKGLIGGTNNRAPGVPSRFSGSLIGDKATLTISSLQPED |
| | | FATYFCALWYSNHWVFGQGTKVELKRGGGGSGGGGSGGGGSSGGGSE |
| | | VKLLESGGGLVQPGGSLKLSCAVSGFSLTDYGVNWVRQAPGRGLEWIGV |
| | | IWGDGITDYNSALKDRFIISKDNGKNTVYLQMSKVRSDDTALYYCVTGLF |
| | | DYWGQGTLVTVSSYPYDVPDYAGGGGGSGGGGSGGGGSGGGGSLDP |
| | | GGGGSG<MNNSQGRVTFEDVTVNFTQGEWQRLNPEQRNLYRDV |
| | | MLENYSNLVSVGQGETTKPDVILRLEQGKEPWLEEEEVLGSGRA |
| | | EKNGDIGGQIWKPKDVKESL>* |
| 124 | DNMT3A- | MPAAKRVKLDGSNHDQEFDPPKVYPPVPAEKRKPIRVLSLEDGIATG |
| | hDNMT3L- | LLVLKDLGIQVDRYIASEVCEDSITVGMVRHQGKIMYVGDVRSVTQK |
| | dCas9- | HIQEWGPFDLVIGGSPCNDLSIVNPARKGLYEGTGRLFFEFYRLLHD |
| | 1xGCN4 | ARPKEGDDRPFFWLFENVVAMGVSDKRDISRFLESNPVMIDAKEVS |
| | | AAHRARYFWGNLPGMNRPLASTVNDKLELQECLEHGRIAKFSKVRT |
| | | ITTRSNSIKQGKDQHFPVFMNEKEDILWCTEMERVFGFPVHYTDVS |
| | | NMSRLARQRLLGRSWSVPVIRHLFAPLKEYFACVSSGNSNANSRGPS |
| | | FSSGLVPLSLRGSHMFETVPVWRRQPVRVLSLFEDIKKELTSLGFLES |
| | | GSDPGQLKHVVDVTDTVRKDVEEWGPFDLVYGATPPLGHTCDRPPS |
| | | WYLFQFHRLLQYARPKPGSPRPFFWMFVDNLVLNKEDLDVASRFLE |
| | | MEPVTIPDVHGGSLQNAVRVWSNIPAIRSSRHWALVSEEELSLLAQN |
| | | KQSSKLAAKWPTKLVKNCFLPLREYFKYFSGGPSSGAPPPSGGSPAGS |
| | | PTSTEEGTSESATPESGPGTSTEPSEGSAPGSPAGSPTSTEEGTSTEPSE |
| | | GSAPGTSTEPSEPKKKRKVGSDKKYSIGLAIGTNSVGWAVITDEYK |
| | | VPSKKFKVLGNTDRHSIKKNLIGALLFDSGETAEATRLKRTARRR |
| | | YTRRKNRICYLQEIFSNEMAKVDDSFFHRLEESFLVEEDKKHERH |
| | | PIFGNIVDEVAYHEKYPTIYHLRKKLVDSTDKADLRLIYLALAHM |
| | | IKFRGHFLIEGDLNPDNSDVDKLFIQLVQTYNQLFEENPINASGVD |
| | | AKAILSARLSKSRRLENLIAQLPGEKKNGLFGNLIALSLGLTPNFK |
| | | SNFDLAEDAKLQLSKDTYDDDLDNLLAQIGDQYADLFLAAKNLS |
| | | DAILLSDILRVNTEITKAPLSASMIKRYDEHHQDLTLLKALVRQQ |
| | | LPEKYKEIFFDQSKNGYAGYIDGGASQEEFYKFIKPILEKMDGTE |
| | | ELLVKLNREDLLRKQRTFDNGSIPHQIHLGELHAILRRQEDFYPF |
| | | LKDNREKIEKILTFRIPYYVGPLARGNSRFAWMTRKSEETITPWN |
| | | FEEVVDKGASAQSFIERMTNFDKNLPNEKVLPKHSLLYEYFTVY |
| | | NELTKVKYVTEGMRKPAFLSGEQKKAIVDLLFKTNRKVTVKQL |
| | | KEDYFKKIECFDSVEISGVEDRFNASLGTYHDLLKIIKDKDFLDNE |
| | | ENEDILEDIVLTLTLFEDREMIEERLKTYAHLFDDKVMKQLKRR |
| | | RYTGWGRLSRKLINGIRDKQSGKTILDFLKSDGFANRNFMQLIH |
| | | DDSLTFKEDIQKAQVSGQGDSLHEHIANLAGSPAIKKGILQTVKV |
| | | VDELVKVMGRHKPENIVIEMARENQTTQKGQKNSRERMKRIEE |
| | | GIKELGSQILKEHPVENTQLQNEKLYLYYLQNGRDMYVDQELDI |
| | | NRLSDYDVDAIVPQSFLKDDSIDNKVLTRSDKNRGKSDNVPSEEV |
| | | VKKMKNYWRQLLNAKLITQRKFDNLTKAERGGLSELDKAGFIK |
| | | RQLVETRQITKHVAQILDSRMNTKYDENDKLIREVKVITLKSKLV |
| | | SDFRKDFQFYKVREINNYHHAHDAYLNAVVGTALIKKYPKLESE |
| | | FVYGDYKVYDVRKMIAKSEQEIGKATAKYFFYSNIMNFFKTEITL |
| | | ANGEIRKRPLIETNGETGEIVWDKGRDFATVRKVLSMPQVNIVK |
| | | KTEVQTGGFSKESILPKRNSDKLIARKKDWDPKKYGGFDSPTVA |
| | | YSVLVVAKVEKGKSKKLKSVKELLGITIMERSSFEKNPIDFLEAK |
| | | GYKEVKKDLIIKLPKYSLFELENGRKRMLASAGELQKGNELALP |
| | | SKYVNFLYLASHYEKLKGSPEDNEQKQLFVEQHKHYLDEIIEQIS |
| | | EFSKRVILADANLDKVLSAYNKHRDKPIREQAENIIHLFTLTNLG |
| | | APAAFKYFDTTIDRKRYTSTKEVLDATLIHQSITGLYETRIDLSQL |
| | | GGDAYPYDVPDYASLGSGSPKKKRKVEDPKKKRKVDGIGSGSNGSS |
| | | GEELLSKNYHLENEVARLKKGSGSGGSGSGGSGSGSGGSGSGGSGSGE |
| | | ELLSKNYHGSGSGQRGSKRTADGSEFESPKKKRKV* |
| 361 | DNMT3A- | MPAAKRVKLDGSNHDQEFDPPKVYPPVPAEKRKPIRVLSLFDGIATG |
| | hDNMT3L- | LLVLKDLGIQVDRYIASEVCEDSITVGMVRHQGKIMYVGDVRSVTQK |
| | XTEN80- | HIQEWGPFDLVIGGSPCNDLSIVNPARKGLYEGTGRLFFEFYRLLHD |
| | TALE | ARPKEGDDRPFFWLFENVVAMGVSDKRDISRFLESNPVMIDAKEVS |
| | HPT8- | AAHRARYFWGNLPGMNRPLASTVNDKLELQECLEHGRIAKFSKVRT |
| | 1xGCN4 | ITTRSNSIKQGKDQHFPVFMNEKEDILWCTEMERVFGFPVHYTDVS |
| | | NMSRLARQRLLGRSWSVPVIRHLFAPLKEYFACVSSGNSNANSRGPS |
| | | FSSGLVPLSLRGSHMFETVPVWRRQPVRVLSLFEDIKKELTSLGFLES |
| | | GSDPGQLKHVVDVTDTVRKDVEEWGPFDLVYGATPPLGHTCDRPPS |
| | | WYLFQFHRLLQYARPKPGSPRPFFWMFVDNLVLNKEDLDVASRFLE |
| | | MEPVTIPDVHGGSLQNAVRVWSNIPAIRSSRHWALVSEEELSLLAQN |
| | | KQSSKLAAKWPTKLVKNCFLPLREYFKYFSGGPSSGAPPPSGGSPAGS |
| | | PTSTEEGTSESATPESGPGTSTEPSEGSAPGSPAGSPTSTEEGTSTEPSE |
| | | GSAPGTSTEPSEPKKKRKVMVDLRTLGYSQQQQEKIKPKVRSTVA |
| | | QHHEALVGHGFTHAHIVALSQHPAALGTVAVKYQDMIAALPEA |
| | | THEAIVGVGKQWSGARALEALLTVAGELRGPPLQLDTGQLLKIA |
| | | KRGGVTAVEAVHAWRNALTGAPLNLTPDQVVAIASNGGGKQAL |
| | | ETVQRLLPVLCQDHGLTPDQVVAIASHDGGKQALETVQRLLPVL |
| | | CQDHGLTPDQVVAIASNIGGKQALETVQRLLPVLCQDHGLTPDQ |
| | | VVAIASNNGGKQALETVQRLLPVLCQDHGLTPDQVVAIASNGGG |
| | | KQALETVQRLLPVLCQDHGLTPDQVVAIASNGGGKQALETVQR |
| | | LLPVLCQDHGLTPDQVVAIASHDGGKQALETVQRLLPVLCQDH |
| | | GLTPDQVVAIASNIGGKQALETVQRLLPVLCQDHGLTPDQVVAI |
| | | ASNNGGKQALETVQRLLPVLCQDHGLTPDQVVAIASNNGGKQA |
| | | LETVQRLLPVLCQDHGLTPDQVVAIASNNGGKQALETVQRLLPV |
| | | LCQDHGLTPDQVVAIASNGGGKQALETVQRLLPVLCQDHGLTP |
| | | DQVVAIASHDGGKQALETVQRLLPVLCQDHGLTPDQVVAIASNG |
| | | GGKQALETVQRLLPVLCQDHGLTPDQVVAIASNNGGKQALETV |
| | | QRLLPVLCQDHGLTPDQVVAIASNIGGKQALETVQRLLPVLCQD |
| | | HGLTPDQVVAIASNNGGKQALETVQRLLPVLCQDHGLTPDQVV |
| | | AIASHDGGKQALESIVAQLSRPDPALAALTNDHLVALACLGGRP |
| | | AMDAVKKGLPHAPELIRRVNRRIGERTSHRVAYPYDVPDYASLGS |
| | | GSPKKKRKVEDPKKKRKVDGIGSGSNGSSGEELLSKNYHLENEVARLK |
| | | KGSGSGGSGSGGSGSGSGGSGSGGSGSGEELLSKNYHGSGSGQRGSK |
| | | RTADGSEFESPKKKRKV* |
| 362 | DNMT3A- | MPAAKRVKLDGSNHDQEFDPPKVYPPVPAEKRKPIRVLSLFDGIATG |
| | hDNMT3L- | LLVLKDLGIQVDRYIASEVCEDSITVGMVRHQGKIMYVGDVRSVTQK |
| | XTEN80- | HIQEWGPFDLVIGGSPCNDLSIVNPARKGLYEGTGRLFFEFYRLLHD |
| | TALE | ARPKEGDDRPFFWLFENVVAMGVSDKRDISRFLESNPVMIDAKEVS |
| | HPT12- | AAHRARYFWGNLPGMNRPLASTVNDKLELQECLEHGRIAKFSKVRT |
| | 1xGCN4 | ITTRSNSIKQGKDQHFPVFMNEKEDILWCTEMERVFGFPVHYTDVS |
| | | NMSRLARQRLLGRSWSVPVIRHLFAPLKEYFACVSSGNSNANSRGPS |
| | | FSSGLVPLSLRGSHMFETVPVWRRQPVRVLSLFEDIKKELTSLGFLES |
| | | GSDPGQLKHVVDVTDTVRKDVEEWGPFDLVYGATPPLGHTCDRPPS |
| | | WYLFQFHRLLQYARPKPGSPRPFFWMFVDNLVLNKEDLDVASRFLE |
| | | MEPVTIPDVHGGSLQNAVRVWSNIPAIRSSRHWALVSEEELSLLAQN |
| | | KQSSKLAAKWPTKLVKNCFLPLREYFKYFSGGPSSGAPPPSGGSPAGS |
| | | PTSTEEGTSESATPESGPGTSTEPSEGSAPGSPAGSPTSTEEGTSTEPSE |
| | | GSAPGTSTEPSEPKKKRKVMVDLRTLGYSQQQQEKIKPKVRSTVA |
| | | QHHEALVGHGFTHAHIVALSQHPAALGTVAVKYQDMIAALPEA |
| | | THEAIVGVGKQWSGARALEALLTVAGELRGPPLQLDTGQLLKIA |
| | | KRGGVTAVEAVHAWRNALTGAPLNLTPDQVVAIASNNGGKQAL |
| | | ETVQRLLPVLCQDHGLTPDQVVAIASNNGGKQALETVQRLLPVL |
| | | CQDHGLTPDQVVAIASNIGGKQALETVQRLLPVLCQDHGLTPDQ |
| | | VVAIASNNGGKQALETVQRLLPVLCQDHGLTPDQVVAIASNNGG |
| | | KQALETVQRLLPVLCQDHGLTPDQVVAIASNIGGKQALETVQRL |
| | | LPVLCQDHGLTPDQVVAIASNNGGKQALETVQRLLPVLCQDHG |
| | | LTPDQVVAIASNGGGKQALETVQRLLPVLCQDHGLTPDQVVAIA |
| | | SNNGGKQALETVQRLLPVLCQDHGLTPDQVVAIASNIGGKQALE |
| | | TVQRLLPVLCQDHGLTPDQVVAIASNNGGKQALETVQRLLPVLC |
| | | QDHGLTPDQVVAIASHDGGKQALETVQRLLPVLCQDHGLTPDQ |
| | | VVAIASHDGGKQALETVQRLLPVLCQDHGLTPDQVVAIASNIGG |
| | | KQALETVQRLLPVLCQDHGLTPDQVVAIASNNGGKQALETVQR |
| | | LLPVLCQDHGLTPDQVVAIASNNGGKQALETVQRLLPVLCQDH |
| | | GLTPDQVVAIASHDGGKQALETVQRLLPVLCQDHGLTPDQVVAI |
| | | ASNIGGKQALESIVAQLSRPDPALAALTNDHLVALACLGGRPAM |
| | | DAVKKGLPHAPELIRRVNRRIGERTSHRVAYPYDVPDYASLGSGS |
| | | PKKKRKVEDPKKKRKVDGIGSGSNGSSGEELLSKNYHLENEVARLKKG |
| | | SGSGGSGSGGSGSGSGGSGSGGSGSGEELLSKNYHGSGSGQRGSKRT |
| | | ADGSEFESPKKKRKV* |
| 363 | 3xGCN4- | MPAAKRVKLDGSEELLSKNYHLENEVARLKKGSGSGGSGSGGSGSGS |
| | TALE | GGSGSGGSGSGEELLSKNYHLENEVARLKKGSGSGGSGSGGSGSGSGG |
| | HPT8- | SGSGGSGSGEELLSKNYHLENEVARLKKGSGSGGSGSGGSGSGSGGSG |
| | ZIM3 | SGGSGSGPKKKRKVMVDLRTLGYSQQQQEKIKPKVRSTVAQHHE |
| | | ALVGHGFTHAHIVALSQHPAALGTVAVKYQDMIAALPEATHEAI |
| | | VGVGKQWSGARALEALLTVAGELRGPPLQLDTGQLLKIAKRGG |
| | | VTAVEAVHAWRNALTGAPLNLTPDQVVAIASNGGGKQALETVQ |
| | | RLLPVLCQDHGLTPDQVVAIASHDGGKQALETVQRLLPVLCQD |
| | | HGLTPDQVVAIASNIGGKQALETVQRLLPVLCQDHGLTPDQVVA |
| | | IASNNGGKQALETVQRLLPVLCQDHGLTPDQVVAIASNGGGKQA |
| | | LETVQRLLPVLCQDHGLTPDQVVAIASNGGGKQALETVQRLLPV |
| | | LCQDHGLTPDQVVAIASHDGGKQALETVQRLLPVLCQDHGLTP |
| | | DQVVAIASNIGGKQALETVQRLLPVLCQDHGLTPDQVVAIASNN |
| | | GGKQALETVQRLLPVLCQDHGLTPDQVVAIASNNGGKQALETV |
| | | QRLLPVLCQDHGLTPDQVVAIASNNGGKQALETVQRLLPVLCQD |
| | | HGLTPDQVVAIASNGGGKQALETVQRLLPVLCQDHGLTPDQVV |
| | | AIASHDGGKQALETVQRLLPVLCQDHGLTPDQVVAIASNGGGKQ |
| | | ALETVQRLLPVLCQDHGLTPDQVVAIASNNGGKQALETVQRLLP |
| | | VLCQDHGLTPDQVVAIASNIGGKQALETVQRLLPVLCQDHGLTP |
| | | DQVVAIASNNGGKQALETVQRLLPVLCQDHGLTPDQVVAIASHD |
| | | GGKQALESIVAQLSRPDPALAALTNDHLVALACLGGRPAMDAV |
| | | KKGLPHAPELIRRVNRRIGERTSHRVAYPYDVPDYASLGSGSPKK |
| | | KRKVEDPKKKRKVDGSGSETPGTSESATPES<MNNSQGRVTFEDVT |
| | | VNFTQGEWQRLNPEQRNLYRDVMLENYSNLVSVGQGETTKPDV |
| | | ILRLEQGKEPWLEEEEVLGSGRAEKNGDIGGQIWKPKDVKESL> |
| | | * |
| 364 | 3xGCN4- | MPAAKRVKLDGSEELLSKNYHLENEVARLKKGSGSGGSGSGGSGSGS |
| | TALE | GGSGSGGSGSGEELLSKNYHLENEVARLKKGSGSGGSGSGGSGSGSGG |
| | HPT12- | SGSGGSGSGEELLSKNYHLENEVARLKKGSGSGGSGSGGSGSGSGGSG |
| | ZIM3 | SGGSGSGPKKKRKVMVDLRTLGYSQQQQEKIKPKVRSTVAQHHE |
| | | ALVGHGFTHAHIVALSQHPAALGTVAVKYQDMIAALPEATHEAI |
| | | VGVGKQWSGARALEALLTVAGELRGPPLQLDTGQLLKIAKRGG |
| | | VTAVEAVHAWRNALTGAPLNLTPDQVVAIASNNGGKQALETVQ |
| | | RLLPVLCQDHGLTPDQVVAIASNNGGKQALETVQRLLPVLCQDH |
| | | GLTPDQVVAIASNIGGKQALETVQRLLPVLCQDHGLTPDQVVAI |
| | | ASNNGGKQALETVQRLLPVLCQDHGLTPDQVVAIASNNGGKQA |
| | | LETVQRLLPVLCQDHGLTPDQVVAIASNIGGKQALETVQRLLPV |
| | | LCQDHGLTPDQVVAIASNNGGKQALETVQRLLPVLCQDHGLTP |
| | | DQVVAIASNGGGKQALETVQRLLPVLCQDHGLTPDQVVAIASNN |
| | | GGKQALETVQRLLPVLCQDHGLTPDQVVAIASNIGGKQALETVQ |
| | | RLLPVLCQDHGLTPDQVVAIASNNGGKQALETVQRLLPVLCQDH |
| | | GLTPDQVVAIASHDGGKQALETVQRLLPVLCQDHGLTPDQVVAI |
| | | ASHDGGKQALETVQRLLPVLCQDHGLTPDQVVAIASNIGGKQAL |
| | | ETVQRLLPVLCQDHGLTPDQVVAIASNNGGKQALETVQRLLPVL |
| | | CQDHGLTPDQVVAIASNNGGKQALETVQRLLPVLCQDHGLTPD |
| | | QVVAIASHDGGKQALETVQRLLPVLCQDHGLTPDQVVAIASNIG |
| | | GKQALESIVAQLSRPDPALAALTNDHLVALACLGGRPAMDAVK |
| | | KGLPHAPELIRRVNRRIGERTSHRVAYPYDVPDYASLGSGSPKKK |
| | | RKVEDPKKKRKVDGSGSETPGTSESATPES<MNNSQGRVTFEDVTV |
| | | NFTQGEWQRLNPEQRNLYRDVMLENYSNLVSVGQGETTKPDVI |
| | | LRLEQGKEPWLEEEEVLGSGRAEKNGDIGGQIWKPKDVKESL>* |

[0119] Without intending to be limited by any theory, the following examples are only for illustrating the complexes, preparation methods, uses, etc. of the present application, and are not intended to limit the scope of the invention of the present application.

### EXAMPLES

### Example 1

### Design and Construction of Plasmids Comprising the Complex of the Present Application

[0120] The amino acid sequences of the epigenetic modification recruitment system with HA epitope, P2A and the recruited elements (including Dnmt3a CD, Dnmt31 CD, dSpCas9 or TALE, KRAB) were optimized by Genscript company into nucleic acid sequences suitable for mammalian expression and synthesized, and then cloned into pLV-CAG vector with CAG promoter and WPRE, and the recruited elements and self-cleaved recruitment system fusion proteins were expressed by the CAG promoter.

[0121] When optimizing different functional elements, the different functional elements were optimized by Genscript company into nucleic acid sequences suitable for mammalian expression and synthesized. First, a vector other than the elements to be replaced was amplified by PCR, and then the elements to be replaced were amplified from the sequences synthesized by the company, and homologous arm sequences were introduced at the same time, and finally, different components were recombined into the vector using NEBuilder reagent to construct the final expression plasmid.

### Example 2

### Inhibitory Effect of the Complex of the Present Application on PTP1b Gene Expression

[0122] Editing tools comprising the complex of the present application (a complex formed by combining a first fusion having an amino acid sequence as set forth in SEQ ID NO: 51 with a second fusion having an amino acid sequence as set forth in SEQ ID NO: 52), and gRNAs differently targeted to mouse PTP1b gene (sg1, sg2, or an equal mixture of sg1 and sg2), complementary nucleotide sequences of the gRNA targeting sequences as set forth in SEQ ID NOS: 336 and 337, and control gRNA (NT gRNA, the complementary nucleotide sequence of its targeting sequence is as set forth in SEQ IF NO: 365) were co-transfected into mouse N2a cell line (700 ng editor+300 ng gRNA, 24-well plate), and the transfected positive cells were sorted after 72 hours of transfection, total RNA was extracted with Trizol, the relative expression of PTP1b was quantified by qPCR, and the relative inhibition efficiencies of the different tools and different gRNAs were calculated (FIG. 2). The results showed that compared with the control group (FIG. 2, right) embodiment (DNMT3A-DNMT3L-dCas9-KRAB) in which the nucleic acid binding domain dCas9, methylation factors DNMT3A and DNMT3L, and the transcriptional repressor KRAB were directly fused together, the complex of the present application achieved higher or substantial inhibition efficiency for gRNAs targeting PTP1b gene, that is, sg1 and/or sg2.

### Example 3

### Inhibitory Effect of the Complex of the Present Application on PCSK9 Gene Expression

[0123] Different versions of tools were in vitro transcribed into mRNA (see Table below for the information on the tools to be tested), and then mixed with chemically synthesized sgRNA at a mass ratio of 1:1 (the mass ratio of mRNA to sgRNA of the first fusion and the second fusion was 0.5:0.5:1; the complementary nucleotide sequence of the sgRNA targeting sequence was as set forth in SEQ ID NO: 341 and/or 342) to prepare LNP (LNP citation: Musunuru, K., Chadwick, A. C., Mizoguchi, T. et al. In vivo CRISPR base editing of PCSK9 durably lowers cholesterol in primates. Nature 593, 429-434 (2021).). The prepared LNP was injected into mice through tail vein at an injection dose of 4.5 mg per kg body weight, and 4-10 days after injection, blood was collected from the cheeks of the mice, and the content of PCSK9 protein in the blood was determined by Elisa. The PBS group was the control group injected with equal volume PBS. The test results of each tool on Day 4 after injection were shown in FIG. 3. Compared with the PBS control group, each group of tools in the present application showed an extremely prominent inhibitory effect on PCSK9 gene expression.

| | | Amino acid | mRNA |
|---|---|---|---|
| | | sequence | sequence |
| Tool | | (SEQ | (SEQ |
| number | Domain Information | ID NO:) | ID NO:) |
| V2 + V3 | scFv-KRAB, DNMT3A- | 78, 79 | 243, 244 |
| | DNMT3L-dCas9-1xGCN4 | | |
| V2 + V4 | scFv-KRAB, DNMT3A- | 78, 80 | 243, 245 |
| | DNMT3L-dCas9-2xGCN4 | | |
| V2 + V5 | scFv-KRAB, DNMT3A- | 78, 81 | 243, 246 |
| | DNMT3L-dCas9-4xGCN4 | | |
| V2 + V6 | scFv-KRAB, DNMT3A- | 78, 82 | 243, 247 |
| | DNMT3L-dCas9-10xGCN4 | | |
| V7 + V8 | DNMT3A-DNMT3L-scFv, | 83, 84 | 248, 249 |
| | 3xGCN4-dCas9-KRAB | | |
| V12 | scFv-KRAB-2a-DNMT3A- | 133 | 253 |
| | DNMT3L-dCas9-1xGCN4 | | |
| V13 | scFv-KRAB-2a-DNMT3A- | 134 | 254 |
| | DNMT3L-dCas9-2xGCN4 | | |
| V14 | scFv-KRAB-2a-DNMT3A- | 135 | 255 |
| | DNMT3L-dCas9-10xGCN4 | | |
| V15 | scFv-ZIM3-2a-DNMT3A- | 136 | 256 |
| | hDNMT3L-dCas9-1xGCN4 | | |
| V16 | scFv-ZIM3-2a-DNMT3A- | 137 | 257 |
| | hDNMT3L-dCas9-2xGCN4 | | |
| V17 | scFv-ZIM3-2a-DNMT3A- | 138 | 258 |
| | hDNMT3L-dCas9-10xGCN4 | | |
| V22 | DNMT3A-DNMT3L-scFv-2a- | 143 | 263 |
| | 1xGCN4-dCas9-KRAB | | |
| V24 | DNMT3A-DNMT3L-scFv-2a- | 145 | 265 |
| | 3xGCN4-dCas9-KRAB | | |
| V25 | DNMT3A-DNMT3L-scFv-2a- | 146 | 266 |
| | 5xGCN4-dCas9-KRAB | | |
| V26 | DNMT3A-hDNMT3L-scFv-2a- | 147 | 267 |
| | 3xGCN4-dCas9-ZIM3 | | |
| V31 | scFV-hDNMT3L-DNMT3A-2a- | 152 | 272 |
| | 3xGCN4-dCas9-KRAB | | |
| V32 | 1xGCN4-ZIM3-2a-DNMT3A- | 153 | 273 |
| | hDNMT3L-dCas9-scFv | | |
| V37 | GFP1-10-KRAB-2a-DNMT3A- | 158 | 278 |
| | DNMT3L-dCas9-7xGFP11 | | |
| V9 + V10 | GFP1-10-KRAB, DNMT3A- | 85, 86 | 250, 251 |
| | DNMT3L-dCas9-1xGFP11 | | |
| V9 + V11 | GFP1-10-KRAB, DNMT3A- | 85, 87 | 250, 252 |
| | DNMT3L-dCas9-8xGFP11 | | |
| V38 | GFP1-10-KRAB-2a-DNMT3A- | 159 | 279 |
| | DNMT3L-dCas9-1xGFP11 | | |
| V39 | GFP1-10-ZIM3-2a-DNMT3A- | 160 | 280 |
| | hDNMT3L-dCas9-1xGFP11 | | |
| V27 | 3xGCN4-dCas9-ZIM3-2a- | 148 | 268 |
| | DNMT3A-hDNMT3L-scFv | | |
| V23 | DNMT3A-DNMT3L-scFv-2a- | 144 | 264 |
| | 2xGCN4-dCas9-KRAB | | |
| V34 | DNMT3A-DNMT3L-1xGCN4- | 155 | 275 |
| | 2a-scFv-dCas9-KRAB | | |
| V45 | DNMT3A-DNMT3L-1xGFP11- | 166 | 286 |
| | 2a-GFP1-10-dCas9-KRAB | | |
| V43 | DNMT3A-DNMT3L-GFP1-10- | 164 | 284 |
| | 2a-1xGFP11-dCas9-KRAB | | |
| V20 | KRAB-scFv-2a-DNMT3A- | 141 | 261 |
| | DNMT3L-dCas9-2xGCN4 | | |
| V40 | GFP1-10-HDAC1-2a-DNMT3A- | 161 | 281 |
| | hDNMT3L-dCas9-1xGFP11 | | |
| V33 | KRAB-1xGCN4-2a-DNMT3A- | 154 | 274 |
| | DNMT3L-dCas9-scFv | | |
| V35 | scFv-dCas9-KRAB-2a-1xGCN4- | 156 | 276 |
| | DNMT3L-DNMT3A | | |
| V36 | scFv-dCas9-HP1a-2a-1xGCN4- | 157 | 277 |
| | DNMT3L-DNMT3A | | |

### Example 4

### Inhibitory Effect of the Complex of the Present Application on PCSK9 Gene Expression

[0124] According to the in vitro transcribed mRNA in Example 3 (see Table below for information on the tools used), the chemically synthesized sgRNA/mRNA mixture with a mass ratio of 1:1 (sgRNA sequence was the same as in Example 3), and the method for preparing LNP, the prepared LNP was added to Huh7 cells (1.25 ug/mL dose). 4 days after the addition of LNP, all cells were collected, total RNA was extracted with Trizol, the relative expression of PCSK9 was quantified by qPCR, and the relative inhibition efficiencies of the different tools were calculated. The results were shown in FIG. 4, wherein the NC group was a control group without adding LNP. It can be seen that the fusion provided by the present application has a significant inhibitory effect on PCSK9 gene expression.

| | | Amino acid | mRNA |
|---|---|---|---|
| | | sequence | sequence |
| Tool | | (SEQ | (SEQ |
| number | Domain Information | ID NO:) | ID NO:) |
| V48 | scFv-ZIM3-P2A-DNMT3A- | 345 | 353 |
| | hDNMT3L-XTEN80-TALE | | |
| | HPT8-1x GCN4 | | |
| V49 | scFv-ZIM3-P2A-DNMT3A- | 346 | 354 |
| | hDNMT3L-XTEN80-TALE | | |
| | HPT12-1x GCN4 | | |
| V50 | 3xGCN4-TALE HPT8-ZIM3- | 347 | 355 |
| | P2A-DNMT3A-hDNMT3L- | | |
| | XTEN80-scFv | | |
| V51 | 3xGCN4-TALE HPT12-ZIM3- | 348 | 356 |
| | P2A-DNMT3A-hDNMT3L- | | |
| | XTEN80-scFv | | |

1. A complex comprising a first fusion and a second fusion, wherein the fusion of one of the first fusion and the second fusion comprises a DNA methylation domain and at least one recruitment domain A, and wherein the other fusion comprises a transcriptional repressor domain and at least one recruitment domain A′; wherein the recruitment domain A and the recruitment domain A′ are capable of interacting, such that the fusion of one of the first fusion and the second fusion or a portion thereof is capable of being recruited to the vicinity of the other fusion, and wherein the first fusion or the second fusion comprises a nucleic acid binding domain.

2. (canceled)

3. The complex according to claim 1, wherein the first fusion comprises a DNA methylation domain, a nucleic acid binding domain and at least one recruitment domain A, and the second fusion comprises a transcriptional repressor domain and at least one recruitment domain A′.

4. The complex according to claim 1, wherein the first fusion comprises, in order from N-terminus to C-terminus, a DNA methylation domain, a nucleic acid binding domain, and a recruitment domain A; and/or the second fusion comprises, in order from N-terminus to C-terminus, a transcriptional repressor domain and a recruitment domain A′, or comprises, in order from N-terminus to C-terminus, a recruitment domain A′ and a transcriptional repressor domain.

5. (canceled)

6. The complex according to claim 1, wherein the first fusion comprises a transcriptional repressor domain, a nucleic acid binding domain and at least one recruitment domain A, and the second fusion comprises a DNA methylation domain and at least one recruitment domain A′.

7. The complex according to claim 1, wherein the first fusion comprises, in order from N-terminus to C-terminus, a recruitment domain A, a nucleic acid binding domain and a transcriptional repressor domain; and/or the second fusion comprises, in order from N-terminus to C-terminus, a DNA methylation domain and a recruitment domain A′, or comprises, in order from N-terminus to C-terminus, a recruitment domain A′ and a DNA methylation domain.

8. (canceled)

9. The complex according to claim 1, characterized in that:
1) the first fusion comprises, in order from N-terminus to C-terminus, a DNA methylation domain, a nucleic acid binding domain, and a recruitment domain A, and the second fusion comprises, in order from N-terminus to C-terminus, a transcriptional repressor domain and a recruitment domain A′; or
2) the first fusion comprises, in order from N-terminus to C-terminus, a DNA methylation domain, a nucleic acid binding domain, and a recruitment domain A, and the second fusion comprises, in order from N-terminus to C-terminus, a recruitment domain A′ and a transcriptional repressor domain; or
3) the first fusion comprises, in order from N-terminus to C-terminus, a recruitment domain A, a nucleic acid binding domain and a transcriptional repressor domain, and the second fusion comprises, in order from N-terminus to C-terminus, a DNA methylation domain and a recruitment domain A′; or
4) the first fusion comprises, in order from N-terminus to C-terminus, a recruitment domain A, a nucleic acid binding domain and a transcriptional repressor domain, and the second fusion comprises, in order from N-terminus to C-terminus, a recruitment domain A′ and a DNA methylation domain.

10. The complex according to claim 1, wherein the nucleic acid binding domain is a DNA binding domain, and the DNA binding domain is selected from: a TALE domain, a zinc finger domain, a tetR domain, a meganuclease, a Cas protein, an Argonaute (Ago) protein, and a homolog, a modified form or a variant thereof.

11. (canceled)

12. (canceled)

13. The complex according to claim 10, wherein the DNA binding domain is capable of binding to a guide RNA, and the guide RNA is capable of specifically recognizing and hybridizing to the target sequence of the target locus.

14. (canceled)

15. (canceled)

16. (canceled)

17. (canceled)

18. The complex according to claim 10, wherein the Cas protein is a dead Cas9 (dCas9) protein or a dead Cas12 (dCas12) protein.

19. The complex according to claim 10, wherein the DNA binding domain comprises an amino acid sequence as set forth in any one of SEQ ID Nos: 1-9, 343 and 344.

20. (canceled)

21. The complex according to claim 1, wherein:
1) the domain of one of the recruitment domain A and the recruitment domain A′ is a GCN4, and wherein the other domain is a scFv; or
2) the domain of one of the recruitment domain A and the recruitment domain A′ is a GFP11 fragment, and wherein the other domain is a GFP1-10; or
3) the domain of one of the recruitment domain A and the recruitment domain A′ is a GVKESLV, and wherein the other domain is a PDZ protein domain.

22. The complex according to claim 1, wherein the DNA methylation domain comprises at least one DNA methyltransferase or a functionally active fragment thereof, and the DNA methyltransferase is selected from DNMT3A, DNMT3B, DNMT3c, DNMT1, DNMT2 and DNMT3L.

23. (canceled)

24. (canceled)

25. The complex according to claim 1, wherein the DNA methyltransferase comprises an amino acid sequence as set forth in any one of SEQ ID Nos: 19-24.

26. The complex according to claim 1, wherein the DNA methylation domain comprises a DNMT3A-DNMT3L domain or a DNMT3L-DNMT3A domain; wherein,-indicates that the domains at both ends thereof are directly or indirectly linked in order from N-terminus to C-terminus.

27. The complex according to claim 1, wherein the transcriptional repressor is selected from one or more of the following domains: KRAB, ZIM3, ZNF680, ZNF554, ZNF264, ZNF582, ZNF324, ZNF669, ZNF354A, ZNF82, ZNF595, ZNF419, ZNF566, ZIM2, EHMT2, SUV39H1, ZFPM1, TRIM28, EZH2, MXD1, SID, LSD1, HP1a, HDAC3, HDAC1, PRMT1, SETDB1, hSIRT1, ZNF436, ZNF257, ZNF675, ZNF490, ZNF320, ZNF331, ZNF816, ZNF41, ZNF189, ZNF528, ZNF543, ZNF140, ZNF610, ZNF350, ZNF8, ZNF30, ZNF98, ZNF677, ZNF596, ZNF214, ZNF37A, ZNF34, ZNF250, ZNF547, ZNF273, ZFP82, ZNF224, ZNF33A, ZNF45, ZNF175, ZNF184, ZFP28-1, ZFP28-2, ZNF18, ZNF213, ZNF394, ZFP1, ZFP14, ZNF416, ZNF557, ZNF729, ZNF254, ZNF764, ZNF785, ZNF10, CBX5, RYBP, YAF2, MGA, CBX1, SCMH1, MPP8, SUMO3, HERC2, BIN1, PCGF2, TOX, FOXA1, FOXA2, IRF2BP1, IRF2BP2, IRF2BPL IRF-2BP1_2 N-terminal domain, HOXA13, HOXB13, HOXC13, HOXA11, HOXC11, HOXC10, HOXA10, HOXB9, HOXA9, ZFP28, ZN334, ZN568, ZN37A, ZN181, ZN510, ZN862, ZN140, ZN208, ZN248, ZN571, ZN699, ZN726, ZIK1, ZNF2, Z705F, ZNF14, ZN471, ZN624, ZNF84, ZNF7, ZN891, ZN337, Z705G, ZN529, ZN729, ZN419, Z705A, ZN302, ZN486, ZN621, ZN688, ZN33A, ZN554, ZN878, ZN772, ZN224, ZN184, ZN544, ZNF57, ZN283, ZN549, ZN211, ZN615, ZN253, ZN226, ZN730, Z585A, ZN732, ZN681, ZN667, ZN649, ZN470, ZN484, ZN431, ZN382, ZN254, ZN124, ZN607, ZN317, ZN620, ZN141, ZN584, ZN540, ZN75D, ZN555, ZN658, ZN684, RBAK, ZN829, ZN582, ZN112, ZN716, HKR1, ZN350, ZN480, ZN416, ZNF92, ZN100, ZN736, ZNF74, ZN443, ZN195, ZN530, ZN782, ZN791, ZN331, Z354C, ZN157, ZN727, ZN550, ZN793, ZN235, ZN724, ZN573, ZN577, ZN789, ZN718, ZN300, ZN383, ZN429, ZN677, ZN850, ZN454, ZN257, ZN264, ZN485, ZN737, ZNF44, ZN596, ZN565, ZN543, ZFP69, SUMO1, ZNF12, ZN169, ZN433, ZN175, ZN347, ZNF25, ZN519, Z585B, ZN517, ZN846, ZN230, ZNF66, ZN713, ZN816, ZN426, ZN674, ZN627, ZNF20, Z587B, ZN316, ZN233, ZN611, ZN556, ZN234, ZN560, ZNF77, ZN682, ZN614, ZN785, ZN445, ZFP30, ZN225, ZN551, ZN610, ZN528, ZN284, ZN418, ZN490, ZN805, Z780B, ZN763, ZN285, ZNF85, ZN223, ZNF90, ZN557, ZN425, ZN229, ZN606, ZN155, ZN222, ZN442, ZNF91, ZN135, ZN778, ZN534, ZN586, ZN567, ZN440, ZN583, ZN441, ZNF43, ZN589, ZN563, ZN561, ZN136, ZN630, ZN527, ZN333, Z324B, ZN786, ZN709, ZN792, ZN599, ZN613, ZF69B, ZN799, ZN569, ZN564, ZN546, ZFP92, ZN723, ZN439, ZFP57, ZNF19, ZN404, ZN274, CBX3, ZN250, ZN570, ZN675, ZN695, ZN548, ZN132, ZN738, ZN420, ZN626, ZN559, ZN460, ZN268, ZN304, ZN605, ZN844, SUMO5, ZN101, ZN783, ZN417, ZN182, ZN823, ZN177, ZN197, ZN717, ZN669, ZN256, ZN251, CBX4, CDY2, CDYL2, ZN562, ZN461, Z324A, ZN766, ID2, ZN214, CBX7, ID1, CREM, SCX, ASCL1, ZN764, SCML2, TWST1, CREB1, TERF1, ID3, CBX8, GSX1, NKX22, ATF1, TWST2, ZNF17, TOX3, TOX4, ZMYM3, I2BP1, RHXF1, SSX2, I2BPL, ZN680, TRI68, HXA13, PHC3, TCF24, HXB13, HEY1, PHC2, ZNF81, FIGLA, SAM11, KMT2B, HEY2, JDP2, HXC13, ASCL4, HHEX, GSX2, ETV7, ASCL3, PHC1, OTP, I2BP2, VGLL2, HXA11, PDLI4, ASCL2, CDX4, ZN860, LMBL4, PDIP3, NKX25, CEBPB, ISL1, CDX2, PROP1, SIN3B, SMBT1, HXC11, HXC10, PRS6A, VSX1, NKX23, MTG16, HMX3, HMX1, KIF22, CSTF2, CEBPE, DLX2, PPARG, PRIC1, UNC4, BARX2, ALX3, TCF15, TERA, VSX2, HXD12, CDX1, TCF23, ALX1, HXA10, RX, CXXC5, SCML1, NFIL3, DLX6, MTG8, CEBPD, SEC13, FIP1, ALX4, LHX3, PRIC2, MAGI3, NELL1, PRRX1, MTG8R, RAX2, DLX3, DLX1, NKX26, NAB1, SAMD7, PITX3, WDR5, MEOX2, NAB2, DHX8, CBX6, EMX2, CPSF6, HXC12, KDM4B, LMBL3, PHX2A, EMX1, NC2B, DLX4, SRY, ZN777, ZN398, GATA3, BSH, SF3B4, TEAD1, TEAD3, RGAP1, PHF1, GATA2, FOXO3, ZN212, IRX4, ZBED6, LHX4, SIN3A, RBBP7, NKX61, R51A1, MB3L1, DLX5, NOTC1, TERF2, ZN282, RGS12, ZN840, SPI2B, PAX7, NKX62, ASXL2, FOX01, GATA1, ZMYM5, LRP1, MIXL1, SGT1, LMCD1, CEBPA, SOX14, WTIP, PRP19, NKX11, RBBP4, DMRT2, SMCA2, and functionally active fragments thereof.

28. The complex according to claim 1, wherein the transcriptional repressor domain comprises an amino acid sequence as set forth in any one of SEQ ID NOs: 25-50.

29. The complex according to claim 1, wherein:
1) the fusion of one of the first fusion and the second fusion comprises a DNA methylation domain-dCas9 or dCas12 or TALE-n×GCN4, and wherein the other fusion comprises a transcriptional repressor domain-scFv; or
2) the fusion of one of the first fusion and the second fusion comprises a DNA methylation domain-dCas9 or dCas12 or TALE-scFv, and wherein the other fusion comprises a transcriptional repressor domain-GCN4; or
3) the fusion of one of the first fusion and the second fusion comprises a DNA methylation domain-dCas9 or dCas12 or TALE-n×GFP11, and wherein the other fusion comprises a transcriptional repressor domain-GFP1-10; or
4) the fusion of one of the first fusion and the second fusion comprises a DNA methylation domain-dCas9 or dCas12 or TALE-GFP1-10, and wherein the other fusion comprises a transcriptional repressor domain-GFP11; or
5) the fusion of one of the first fusion and the second fusion comprises a DNA methylation domain-dCas9 or dCas12 or TALE-n×GCN4, and wherein the other fusion comprises a scFv-transcriptional repressor domain; or
6) the fusion of one of the first fusion and the second fusion comprises a DNA methylation domain-dCas9 or dCas12 or TALE-scFv, and wherein the other fusion comprises a GCN4-transcriptional repressor domain; or
7) the fusion of one of the first fusion and the second fusion comprises a DNA methylation domain-dCas9 or dCas12 or TALE-n×GFP11, and wherein the other fusion comprises a GFP1-10-transcriptional repressor domain; or
8) the fusion of one of the first fusion and the second fusion comprises a DNA methylation domain-dCas9 or dCas12 or TALE-GFP1-10, and wherein the other fusion comprises a GFP11-transcriptional repressor domain; or
9) the fusion of one of the first fusion and the second fusion comprises a n×GCN4-dCas9 or dCas12 or TALE-transcriptional repressor domain, and wherein the other fusion comprises a DNA methylation domain-scFv; or
10) the fusion of one of the first fusion and the second fusion comprises a scFv-dCas9 or dCas12 or TALE-transcriptional repressor domain, and wherein the other fusion comprises a DNA methylation domain-GCN4; or
11) the fusion of one of the first fusion and the second fusion comprises a n×GFP11-dCas9 or dCas12 or TALE-transcriptional repressor domain, and wherein the other fusion comprises a DNA methylation domain-GFP1-10; or
12) the fusion of one of the first fusion and the second fusion comprises a GFP1-10-dCas9 or dCas12 or TALE-transcriptional repressor domain, and wherein the other fusion comprises a DNA methylation domain-GFP11; or
13) the fusion of one of the first fusion and the second fusion comprises a n×GCN4-dCas9 or dCas12 or TALE-transcriptional repressor domain, and wherein the other fusion comprises a scFv-DNA methylation domain; or
14) the fusion of one of the first fusion and the second fusion comprises a scFv-dCas9 or dCas12 or TALE-transcriptional repressor domain, and wherein the other fusion comprises a GCN4-DNA methylation domain; or
15) the fusion of one of the first fusion and the second fusion comprises a n×GFP11-dCas9 or dCas12 or TALE-transcriptional repressor domain, and wherein the other fusion comprises a GFP1-10-DNA methylation domain; or
16) the fusion of one of the first fusion and the second fusion comprises a GFP1-10-dCas9 or dCas12 or TALE-transcriptional repressor domain, and wherein the other fusion comprises a GFP11-DNA methylation domain;
wherein - indicates that the domains at both ends thereof are directly or indirectly linked in order from N-terminus to C-terminus; n×GCN4 or n×GFP11 denotes respectively n copies of GCN4 or n copies of GFP11 linked by a linker sequence, and n is any integer selected from 1 to 20.

30. The complex according to claim 1, wherein the first fusion and/or the second fusion comprises an amino acid sequence as set forth in any one of SEQ ID NOs: 51-76, 78-124, and 361-364.

31. The complex according to claim 1, comprising an amino acid sequence as set forth in any one of SEQ ID NOs: 133-168, and 345 and 346-348.

32. (canceled)

33. (canceled)

34. (canceled)

35. (canceled)

36. A nucleic acid encoding the complex of claim 1, wherein the nucleic acid comprising a nucleic acid sequence as set forth in any one of SEQ ID NOs: 169-335 and 349-360.

37. (canceled)

38. (canceled)

39. (canceled)

40. (canceled)

41. (canceled)

42. (canceled)

43. (canceled)

44. (canceled)

45. (canceled)

46. (canceled)

47. (canceled)

48. (canceled)

49. (canceled)

50. (canceled)

51. (canceled)

52. (canceled)

53. A method of treating or alleviating a disease or a disorder thereof associated with abnormal target gene expression and/or abnormal target gene activity, comprising administering to the subject the complex of claim 1.

54. A method of treating or alleviating a disease or a disorder thereof associated with abnormal target gene expression and/or abnormal target gene activity, comprising administering to the subject the nucleic acid of claim 36.

The application's sequence listing, which the Patent Office published only in electronic form, follows.

SEQUENCE LISTING (364 sequences)

SEQ ID NO: 1 - protein, 1368 aa, synthetic construct
  REGION 1..1368: note = nucleic domain_dCas9_H840A_D10A
MDKKYSIGLAIGTNSVGWAVITDEYKVPSKKFKVLGNTDRHSIKKNLIGALLFDSGETAEATRLKRTARRRYTRRKNRICYLQEIFSNEMAKVDDSFFHRLEESFLVEEDKKHERHPIFGNIVDEVAYHEKYPTIYHLRKKLVDSTDKADLRLIYLALAHMIKFRGHFLIEGDLNPDNSDVDKLFIQLVQTYNQLFEENPINASGVDAKAILSARLSKSRRLENLIAQLPGEKKNGLFGNLIALSLGLTPNFKSNFDLAEDAKLQLSKDTYDDDLDNLLAQIGDQYADLFLAAKNLSDAILLSDILRVNTEITKAPLSASMIKRYDEHHQDLTLLKALVRQQLPEKYKEIFFDQSKNGYAGYIDGGASQEEFYKFIKPILEKMDGTEELLVKLNREDLLRKQRTFDNGSIPHQIHLGELHAILRRQEDFYPFLKDNREKIEKILTFRIPYYVGPLARGNSRFAWMTRKSEETITPWNFEEVVDKGASAQSFIERMTNFDKNLPNEKVLPKHSLLYEYFTVYNELTKVKYVTEGMRKPAFLSGEQKKAIVDLLFKTNRKVTVKQLKEDYFKKIECFDSVEISGVEDRFNASLGTYHDLLKIIKDKDFLDNEENEDILEDIVLTLTLFEDREMIEERLKTYAHLFDDKVMKQLKRRRYTGWGRLSRKLINGIRDKQSGKTILDFLKSDGFANRNFMQLIHDDSLTFKEDIQKAQVSGQGDSLHEHIANLAGSPAIKKGILQTVKVVDELVKVMGRHKPENIVIEMARENQTTQKGQKNSRERMKRIEEGIKELGSQILKEHPVENTQLQNEKLYLYYLQNGRDMYVDQELDINRLSDYDVDAIVPQSFLKDDSIDNKVLTRSDKNRGKSDNVPSEEVVKKMKNYWRQLLNAKLITQRKFDNLTKAERGGLSELDKAGFIKRQLVETRQITKHVAQILDSRMNTKYDENDKLIREVKVITLKSKLVSDFRKDFQFYKVREINNYHHAHDAYLNAVVGTALIKKYPKLESEFVYGDYKVYDVRKMIAKSEQEIGKATAKYFFYSNIMNFFKTEITLANGEIRKRPLIETNGETGEIVWDKGRDFATVRKVLSMPQVNIVKKTEVQTGGFSKESILPKRNSDKLIARKKDWDPKKYGGFDSPTVAYSVLVVAKVEKGKSKKLKSVKELLGITIMERSSFEKNPIDFLEAKGYKEVKKDLIIKLPKYSLFELENGRKRMLASAGELQKGNELALPSKYVNFLYLASHYEKLKGSPEDNEQKQLFVEQHKHYLDEIIEQISEFSKRVILADANLDKVLSAYNKHRDKPIREQAENIIHLFTLTNLGAPAAFKYFDTTIDRKRYTSTKEVLDATLIHQSITGLYETRIDLSQLGGD

SEQ ID NO: 2 - protein, 1368 aa, synthetic construct
  REGION 1..1368: note = nucleic domain_nCas9_D10A
MDKKYSIGLAIGTNSVGWAVITDEYKVPSKKFKVLGNTDRHSIKKNLIGALLFDSGETAEATRLKRTARRRYTRRKNRICYLQEIFSNEMAKVDDSFFHRLEESFLVEEDKKHERHPIFGNIVDEVAYHEKYPTIYHLRKKLVDSTDKADLRLIYLALAHMIKFRGHFLIEGDLNPDNSDVDKLFIQLVQTYNQLFEENPINASGVDAKAILSARLSKSRRLENLIAQLPGEKKNGLFGNLIALSLGLTPNFKSNFDLAEDAKLQLSKDTYDDDLDNLLAQIGDQYADLFLAAKNLSDAILLSDILRVNTEITKAPLSASMIKRYDEHHQDLTLLKALVRQQLPEKYKEIFFDQSKNGYAGYIDGGASQEEFYKFIKPILEKMDGTEELLVKLNREDLLRKQRTFDNGSIPHQIHLGELHAILRRQEDFYPFLKDNREKIEKILTFRIPYYVGPLARGNSRFAWMTRKSEETITPWNFEEVVDKGASAQSFIERMTNFDKNLPNEKVLPKHSLLYEYFTVYNELTKVKYVTEGMRKPAFLSGEQKKAIVDLLFKTNRKVTVKQLKEDYFKKIECFDSVEISGVEDRFNASLGTYHDLLKIIKDKDFLDNEENEDILEDIVLTLTLFEDREMIEERLKTYAHLFDDKVMKQLKRRRYTGWGRLSRKLINGIRDKQSGKTILDFLKSDGFANRNFMQLIHDDSLTFKEDIQKAQVSGQGDSLHEHIANLAGSPAIKKGILQTVKVVDELVKVMGRHKPENIVIEMARENQTTQKGQKNSRERMKRIEEGIKELGSQILKEHPVENTQLQNEKLYLYYLQNGRDMYVDQELDINRLSDYDVHHIVPQSFLKDDSIDNKVLTRSDKNRGKSDNVPSEEVVKKMKNYWRQLLNAKLITQRKFDNLTKAERGGLSELDKAGFIKRQLVETRQITKHVAQILDSRMNTKYDENDKLIREVKVITLKSKLVSDFRKDFQFYKVREINNYHHAHDAYLNAVVGTALIKKYPKLESEFVYGDYKVYDVRKMIAKSEQEIGKATAKYFFYSNIMNFFKTEITLANGEIRKRPLIETNGETGEIVWDKGRDFATVRKVLSMPQVNIVKKTEVQTGGFSKESILPKRNSDKLIARKKDWDPKKYGGFDSPTVAYSVLVVAKVEKGKSKKLKSVKELLGITIMERSSFEKNPIDFLEAKGYKEVKKDLIIKLPKYSLFELENGRKRMLASAGELQKGNELALPSKYVNFLYLASHYEKLKGSPEDNEQKQLFVEQHKHYLDEIIEQISEFSKRVILADANLDKVLSAYNKHRDKPIREQAENIIHLFTLTNLGAPAAFKYFDTTIDRKRYTSTKEVLDATLIHQSITGLYETRIDLSQLGGD

SEQ ID NO: 3 - protein, 1368 aa, synthetic construct
  REGION 1..1368: note = nucleic domain_nCas9_H839A
MDKKYSIGLDIGTNSVGWAVITDEYKVPSKKFKVLGNTDRHSIKKNLIGALLFDSGETAEATRLKRTARRRYTRRKNRICYLQEIFSNEMAKVDDSFFHRLEESFLVEEDKKHERHPIFGNIVDEVAYHEKYPTIYHLRKKLVDSTDKADLRLIYLALAHMIKFRGHFLIEGDLNPDNSDVDKLFIQLVQTYNQLFEENPINASGVDAKAILSARLSKSRRLENLIAQLPGEKKNGLFGNLIALSLGLTPNFKSNFDLAEDAKLQLSKDTYDDDLDNLLAQIGDQYADLFLAAKNLSDAILLSDILRVNTEITKAPLSASMIKRYDEHHQDLTLLKALVRQQLPEKYKEIFFDQSKNGYAGYIDGGASQEEFYKFIKPILEKMDGTEELLVKLNREDLLRKQRTFDNGSIPHQIHLGELHAILRRQEDFYPFLKDNREKIEKILTFRIPYYVGPLARGNSRFAWMTRKSEETITPWNFEEVVDKGASAQSFIERMTNFDKNLPNEKVLPKHSLLYEYFTVYNELTKVKYVTEGMRKPAFLSGEQKKAIVDLLFKTNRKVTVKQLKEDYFKKIECFDSVEISGVEDRFNASLGTYHDLLKIIKDKDFLDNEENEDILEDIVLTLTLFEDREMIEERLKTYAHLFDDKVMKQLKRRRYTGWGRLSRKLINGIRDKQSGKTILDFLKSDGFANRNFMQLIHDDSLTFKEDIQKAQVSGQGDSLHEHIANLAGSPAIKKGILQTVKVVDELVKVMGRHKPENIVIEMARENQTTQKGQKNSRERMKRIEEGIKELGSQILKEHPVENTQLQNEKLYLYYLQNGRDMYVDQELDINRLSDYDVAHIVPQSFLKDDSIDNKVLTRSDKNRGKSDNVPSEEVVKKMKNYWRQLLNAKLITQRKFDNLTKAERGGLSELDKAGFIKRQLVETRQITKHVAQILDSRMNTKYDENDKLIREVKVITLKSKLVSDFRKDFQFYKVREINNYHHAHDAYLNAVVGTALIKKYPKLESEFVYGDYKVYDVRKMIAKSEQEIGKATAKYFFYSNIMNFFKTEITLANGEIRKRPLIETNGETGEIVWDKGRDFATVRKVLSMPQVNIVKKTEVQTGGFSKESILPKRNSDKLIARKKDWDPKKYGGFDSPTVAYSVLVVAKVEKGKSKKLKSVKELLGITIMERSSFEKNPIDFLEAKGYKEVKKDLIIKLPKYSLFELENGRKRMLASAGELQKGNELALPSKYVNFLYLASHYEKLKGSPEDNEQKQLFVEQHKHYLDEIIEQISEFSKRVILADANLDKVLSAYNKHRDKPIREQAENIIHLFTLTNLGAPAAFKYFDTTIDRKRYTSTKEVLDATLIHQSITGLYETRIDLSQLGGD

SEQ ID NO: 4 - protein, 1368 aa, synthetic construct
  REGION 1..1368: note = nucleic domain_nCas9_H840A
MDKKYSIGLDIGTNSVGWAVITDEYKVPSKKFKVLGNTDRHSIKKNLIGALLFDSGETAEATRLKRTARRRYTRRKNRICYLQEIFSNEMAKVDDSFFHRLEESFLVEEDKKHERHPIFGNIVDEVAYHEKYPTIYHLRKKLVDSTDKADLRLIYLALAHMIKFRGHFLIEGDLNPDNSDVDKLFIQLVQTYNQLFEENPINASGVDAKAILSARLSKSRRLENLIAQLPGEKKNGLFGNLIALSLGLTPNFKSNFDLAEDAKLQLSKDTYDDDLDNLLAQIGDQYADLFLAAKNLSDAILLSDILRVNTEITKAPLSASMIKRYDEHHQDLTLLKALVRQQLPEKYKEIFFDQSKNGYAGYIDGGASQEEFYKFIKPILEKMDGTEELLVKLNREDLLRKQRTFDNGSIPHQIHLGELHAILRRQEDFYPFLKDNREKIEKILTFRIPYYVGPLARGNSRFAWMTRKSEETITPWNFEEVVDKGASAQSFIERMTNFDKNLPNEKVLPKHSLLYEYFTVYNELTKVKYVTEGMRKPAFLSGEQKKAIVDLLFKTNRKVTVKQLKEDYFKKIECFDSVEISGVEDRFNASLGTYHDLLKIIKDKDFLDNEENEDILEDIVLTLTLFEDREMIEERLKTYAHLFDDKVMKQLKRRRYTGWGRLSRKLINGIRDKQSGKTILDFLKSDGFANRNFMQLIHDDSLTFKEDIQKAQVSGQGDSLHEHIANLAGSPAIKKGILQTVKVVDELVKVMGRHKPENIVIEMARENQTTQKGQKNSRERMKRIEEGIKELGSQILKEHPVENTQLQNEKLYLYYLQNGRDMYVDQELDINRLSDYDVHAIVPQSFLKDDSIDNKVLTRSDKNRGKSDNVPSEEVVKKMKNYWRQLLNAKLITQRKFDNLTKAERGGLSELDKAGFIKRQLVETRQITKHVAQILDSRMNTKYDENDKLIREVKVITLKSKLVSDFRKDFQFYKVREINNYHHAHDAYLNAVVGTALIKKYPKLESEFVYGDYKVYDVRKMIAKSEQEIGKATAKYFFYSNIMNFFKTEITLANGEIRKRPLIETNGETGEIVWDKGRDFATVRKVLSMPQVNIVKKTEVQTGGFSKESILPKRNSDKLIARKKDWDPKKYGGFDSPTVAYSVLVVAKVEKGKSKKLKSVKELLGITIMERSSFEKNPIDFLEAKGYKEVKKDLIIKLPKYSLFELENGRKRMLASAGELQKGNELALPSKYVNFLYLASHYEKLKGSPEDNEQKQLFVEQHKHYLDEIIEQISEFSKRVILADANLDKVLSAYNKHRDKPIREQAENIIHLFTLTNLGAPAAFKYFDTTIDRKRYTSTKEVLDATLIHQSITGLYETRIDLSQLGGD

SEQ ID NO: 5 - protein, 1368 aa, synthetic construct
  REGION 1..1368: note = nucleic domain_nCas9_N863A
MDKKYSIGLDIGTNSVGWAVITDEYKVPSKKFKVLGNTDRHSIKKNLIGALLFDSGETAEATRLKRTARRRYTRRKNRICYLQEIFSNEMAKVDDSFFHRLEESFLVEEDKKHERHPIFGNIVDEVAYHEKYPTIYHLRKKLVDSTDKADLRLIYLALAHMIKFRGHFLIEGDLNPDNSDVDKLFIQLVQTYNQLFEENPINASGVDAKAILSARLSKSRRLENLIAQLPGEKKNGLFGNLIALSLGLTPNFKSNFDLAEDAKLQLSKDTYDDDLDNLLAQIGDQYADLFLAAKNLSDAILLSDILRVNTEITKAPLSASMIKRYDEHHQDLTLLKALVRQQLPEKYKEIFFDQSKNGYAGYIDGGASQEEFYKFIKPILEKMDGTEELLVKLNREDLLRKQRTFDNGSIPHQIHLGELHAILRRQEDFYPFLKDNREKIEKILTFRIPYYVGPLARGNSRFAWMTRKSEETITPWNFEEVVDKGASAQSFIERMTNFDKNLPNEKVLPKHSLLYEYFTVYNELTKVKYVTEGMRKPAFLSGEQKKAIVDLLFKTNRKVTVKQLKEDYFKKIECFDSVEISGVEDRFNASLGTYHDLLKIIKDKDFLDNEENEDILEDIVLTLTLFEDREMIEERLKTYAHLFDDKVMKQLKRRRYTGWGRLSRKLINGIRDKQSGKTILDFLKSDGFANRNFMQLIHDDSLTFKEDIQKAQVSGQGDSLHEHIANLAGSPAIKKGILQTVKVVDELVKVMGRHKPENIVIEMARENQTTQKGQKNSRERMKRIEEGIKELGSQILKEHPVENTQLQNEKLYLYYLQNGRDMYVDQELDINRLSDYDVHHIVPQSFLKDDSIDNKVLTRSDKARGKSDNVPSEEVVKKMKNYWRQLLNAKLITQRKFDNLTKAERGGLSELDKAGFIKRQLVETRQITKHVAQILDSRMNTKYDENDKLIREVKVITLKSKLVSDFRKDFQFYKVREINNYHHAHDAYLNAVVGTALIKKYPKLESEFVYGDYKVYDVRKMIAKSEQEIGKATAKYFFYSNIMNFFKTEITLANGEIRKRPLIETNGETGEIVWDKGRDFATVRKVLSMPQVNIVKKTEVQTGGFSKESILPKRNSDKLIARKKDWDPKKYGGFDSPTVAYSVLVVAKVEKGKSKKLKSVKELLGITIMERSSFEKNPIDFLEAKGYKEVKKDLIIKLPKYSLFELENGRKRMLASAGELQKGNELALPSKYVNFLYLASHYEKLKGSPEDNEQKQLFVEQHKHYLDEIIEQISEFSKRVILADANLDKVLSAYNKHRDKPIREQAENIIHLFTLTNLGAPAAFKYFDTTIDRKRYTSTKEVLDATLIHQSITGLYETRIDLSQLGGD

SEQ ID NO: 6 - protein, 1307 aa, synthetic construct
  REGION 1..1307: note = nucleic domain_dCas12(AsCpf1
MTQFEGFTNLYQVSKTLRFELIPQGKTLKHIQEQGFIEEDKARNDHYKELKPIIDRIYKTYADQCLQLVQLDWENLSAAIDSYRKEKTEETRNALIEEQATYRNAIHDYFIGRTDNLTDAINKRHAEIYKGLFKAELFNGKVLKQLGTVTTTEHENALLRSFDKFTTYFSGFYENRKNVFSAEDISTAIPHRIVQDNFPKFKENCHIFTRLITAVPSLREHFENVKKAIGIFVSTSIEEVFSFPFYNQLLTQTQIDLYNQLLGGISREAGTEKIKGLNEVLNLAIQKNDETAHIIASLPHRFIPLFKQILSDRNTLSFILEEFKSDEEVIQSFCKYKTLLRNENVLETAEALFNELNSIDLTHIFISHKKLETISSALCDHWDTLRNALYERRISELTGKITKSAKEKVQRSLKHEDINLQEIISAAGKELSEAFKQKTSEILSHAHAALDQPLPTTLKKQEEKEILKSQLDSLLGLYHLLDWFAVDESNEVDPEFSARLTGIKLEMEPSLSFYNKARNYATKKPYSVEKFKLNFQMPTLASGWDVNKEKNNGAILFVKNGLYYLGIMPKQKGRYKALSFEPTEKTSEGFDKMYYDYFPDAAKMIPKCSTQLKAVTAHFQTHTTPILLSNNFIEPLEITKEIYDLNNPEKEPKKFQTAYAKKTGDQKGYREALCKWIDFTRDFLSKYTKTTSIDLSSLRPSSQYKDLGEYYAELNPLLYHISFQRIAEKEIMDAVETGKLYLFQIYNKDFAKGHHGKPNLHTLYWTGLFSPENLAKTSIKLNGQAELFYRPKSRMKRMAHRLGEKMLNKKLKDQKTPIPDTLYQELYDYVNHRLSHDLSDEARALLPNVITKEVSHEIIKDRRFTSDKFFFHVPITLNYQAANSPSKFNQRVNAYLKEHPETPIIGIARGERNLIYITVIDSTGKILEQRSLNTIQQFDYQKKLDNREKERVAARQAWSVVGTIKDLKQGYLSQVIHEIVDLMIHYQAVVVLENLNFGFKSKRTGIAEKAVYQQFEKMLIDKLNCLVLKDYPAEKVGGVLNPYQLTDQFTSFAKMGTQSGFLFYVPAPYTSKIDPLTGFVDPFVWKTIKNHESRKHFLEGFDFLHYDVKTGDFILHFKMNRNLSFQRGLPGFMPAWDIVFEKNETQFDAKGTPFIAGKRIVPVIENHRFTGRYRDLYPANELIALLEEKGIVFRDGSNILPKLLENDDSHAIDTMVALIRSVLQMRNSNAATGEDYINSPVRDLNGVCFDSRFQNPEWPMDADANGAYHIALKGQLLLNHLKESKDLKLQNGISNQDWLAYIQELRN

SEQ ID NO: 7 - protein, 1228 aa, synthetic construct
  REGION 1..1228: note = nucleic domain_dCas12(LbCpf1
MSKLEKFTNCYSLSKTLRFKAIPVGKTQENIDNKRLLVEDEKRAEDYKGVKKLLDRYYLSFINDVLHSIKLKNLNNYISLFRKKTRTEKENKELENLEINLRKEIAKAFKGNEGYKSLFKKDIIETILPEFLDDKDEIALVNSFNGFTTAFTGFFDNRENMFSEEAKSTSIAFRCINENLTRYISNMDIFEKVDAIFDKHEVQEIKEKILNSDYDVEDFFEGEFFNFVLTQEGIDVYNAIIGGFVTESGEKIKGLNEYINLYNQKTKQKLPKFKPLYKQVLSDRESLSFYGEGYTSDEEVLEVFRNTLNKNSEIFSSIKKLEKLFKNFDEYSSAGIFVKNGPAISTISKDIFGEWNVIRDKWNAEYDDIHLKKKAVVTEKYEDDRRKSFKKIGSFSLEQLQEYADADLSVVEKLKEIIIQKVDEIYKVYGSSEKLFDADFVLEKSLKKNDAVVAIMKDLLDSVKSFENYIKAFFGEGKETNRDESFYGDFVLAYDILLKVDHIYDAIRNYVTQKPYSKDKFKLYFQNPQFMGGWDKDKETDYRATILRYGSKYYLAIMDKKYAKCLQKIDKDDVNGNYEKINYKLLPGPNKMLPKVFFSKKWMAYYNPSEDIQKIYKNGTFKKGDMFNLNDCHKLIDFFKDSISRYPKWSNAYDFNFSETEKYKDIAGFYREVEEQGYKVSFESASKKEVDKLVEEGKLYMFQIYNKDFSDKSHGTPNLHTMYFKLLFDENNHGQIRLSGGAELFMRRASLKKEELVVHPANSPIANKNPDNPKKTTTLSYDVYKDKRFSEDQYELHIPIAINKCPKNIFKINTEVRVLLKHDDNPYVIGIARGERNLLYIVVVDGKGNIVEQYSLNEIINNFNGIRIKTDYHSLLDKKEKERFEARQNWTSIENIKELKAGYISQVVHKICELVEKYDAVIALEDLNSGFKNSRVKVEKQVYQKFEKMLIDKLNYMVDKKSNPCATGGALKGYQITNKFESFKSMSTQNGFIFYIPAWLTSKIDPSTGFVNLLKTKYTSIADSKKFISSFDRIMYVPEEDLFEFALDYKNFSRTDADYIKKWKLYSYGNRIRIFRNPKKNNVFDWEEVCLTSAYKELFNKYGINYQQGDIRALLCEQSDKAFYSSFMALMSLMLQMRNSITGRTDVDFLISPVKNSDGIFYDSRNYEAQENAILPKNADANGAYNIARKVLWAIGQFKKAEDEKLDKVKIAISNKEWLEYAQTSVKH

SEQ ID NO: 8 - protein, 302 aa, synthetic construct
  REGION 1..302: note = DNMT3A-CD
MNHDQEFDPPKVYPPVPAEKRKPIRVLSLFDGIATGLLVLKDLGIQVDRYIASEVCEDSITVGMVRHQGKIMYVGDVRSVTQKHIQEWGPFDLVIGGSPCNDLSIVNPARKGLYEGTGRLFFEFYRLLHDARPKEGDDRPFFWLFENVVAMGVSDKRDISRFLESNPVMIDAKEVSAAHRARYFWGNLPGMNRPLASTVNDKLELQECLEHGRIAKFSKVRTITTRSNSIKQGKDQHFPVFMNEKEDILWCTEMERVFGFPVHYTDVSNMSRLARQRLLGRSWSVPVIRHLFAPLKEYFACV

SEQ ID NO: 9 - protein, 279 aa, synthetic construct
  REGION 1..279: note = DNMT3B-CD
IRVLSLFDGIATGYLVLKELGIKVGKYVASEVCEESIAVGTVKHEGNIKYVNDVRNITKKNIEEWGPFDLVIGGSPCNDLSNVNPARKGLYEGTGRLFFEFYHLLNYSRPKEGDDRPFFWMFENVVAMKVGDKRDISRFLECNPVMIDAIKVSAAHRARYFWGNLPGMNRPVIASKNDKLELQDCLEYNRIAKLKKVQTITTKSNSIKQGKNQLFPVVMNGKEDVLWCTELERIFGFPVHYTDVSNMGRGARQKLLGRSWSVPVIRHLFAPLKDYFACE

SEQ ID NO: 10 - protein, 215 aa, synthetic construct
  REGION 1..215: note = DNMT3L-CD
MGPMEIYKTVSAWKRQPVRVLSLFRNIDKVLKSLGFLESGSGSGGGTLKYVEDVTNVVRRDVEKWGPFDLVYGSTQPLGSSCDRCPGWYMFQFHRILQYALPRQESQRPFFWIFMDNLLLTEDDQETTTRFLQTEAVTLQDVRGRDYQNAMRVWSNIPGLKSKHAPLTPKEEEYLQAQVRSRSKLDAPKVDLLVKNCLLPLREYFKYFSQNSLPL

SEQ ID NO: 11 - protein, 461 aa, synthetic construct
  REGION 1..461: note = DNMT1-CD
LRTLDVFSGCGGLSEGFHQAGISDTLWAIEMWDPAAQAFRLNNPGSTVFTEDCNILLKLVMAGETTNSRGQRLPQKGDVEMLCGGPPCQGFSGMNRFNSRTYSKFKNSLVVSFLSYCDYYRPRFFLLENVRNFVSFKRSMVLKLTLRCLVRMGYQCTFGVLQAGQYGVAQTRRRAIILAAAPGEKLPLFPEPLHVFAPRACQLSVVVDDKKFVSNITRLSSGPFRTITVRDTMSDLPEVRNGASALEISYNGEPQSWFQRQLRGAQYQPILRDHICKDMSALVAARMRHIPLAPGSDWRDLPNIEVRLSDGTMARKLRYTHHDRKNGRSSSGALRGVCSCVEAGKACDPAARQFNTLIPWCLPHTGNRHNHWAGLYGRLEWDGFFSTTVTNPEPMGKQGRVLHPEQHRVVSVRECARSQGFPDTYRLFGNILDKHRQVGNAVPPPLAKAIGLEIKLCMLAK

SEQ ID NO: 12 - protein, 279 aa, synthetic construct
  REGION 1..279: note = Dnmt3c-CD(from mouse)
IRVLSLFDGIATGYLVLKELGIKVEKYIASEVCAESIAVGTVKHEGQIKYVDDIRNITKEHIDEWGPFDLVIGGSPCNDLSCVNPVRKGLFEGTGRLFFEFYRLLNYSCPEEEDDRPFFWMFENVVAMEVGDKRDISRFLECNPVMIDAIKVSAAHRARYFWGNLPGMNRPVMASKNDKLELQDCLEFSRTAKLKKVQTITTKSNSIRQGKNQLFPVVMNGKDDVLWCTELERIFGFPEHYTDVSNMGRGARQKLLGRSWSVPVIRHLFAPLKDHFACE

SEQ ID NO: 13 - protein, 214 aa, synthetic construct
  REGION 1..214: note = DNMT3L-1 CD(Rattus_rattus)
SPVEIYKTVSAWKRQPVRVLSLFGNIDKELKSLGFLESGSGSEGGTLKYVEDVTNVVRREVEKWGPFDLVYGSTQPLGYSCDRCPGWYMFQFHRILQYARPRQDSQQPFFWIFVDNLLLTEDDQETTVRFLQTEAVTLQDVRGRVLQNAVRVWSNIPGLKSKHADLTPKEEQSLRTQVRTRSKLAAQKVDSLVKYCLLPLREYFKYFSQNSLPL

SEQ ID NO: 14 - protein, 214 aa, synthetic construct
  REGION 1..214: note = DNMT3L-2 CD(Mus_pahari)
GPIEIYKTVSAWKRQPVRVLSLFGNIDKVLKSLGFLESGSGSEGGMLKYVEDVTNVVRRDVEKWGPFDLVYGSTQPLGSSCDRCPGWYMFQFHRILQYALPRQESQRPFFWIFMDNLLLTEDDQETTVRFLQTETVTLQYVRGRVLQNAVRVWSNIPGLKSKHAVLTPQEEETLQAQIRTRNKPDTQKVDPLVKSCLLPLREYFKYFSQNSLPL

SEQ ID NO: 15 - protein, 213 aa, synthetic construct
  REGION 1..213: note = DNMT3L-3 CD(Grammomys_surdaster)
SPMEIYKTVSAWKRQPVRVLSLFGNIDKELKSLGFLEIGSDSEGGTLKYVEDVTNVVRRDVEKWGPFDLVYGSTNPLGNSCDRCPGWYMFQFHRILQYARPRQDSQKPFFWIFMDNLLLTEDDQVTTVRFLQTEAVTLQDVRGRVLQNAVRVWSNIPGLKSKHSVLTPKEEQSLQAQVRTRSKLPTQVNPLVKTCLLPLREYFKCFSQNSLPL

SEQ ID NO: 16 - protein, 214 aa, synthetic construct
  REGION 1..214: note = DNMT3L-4 CD(Arvicanthis_niloticu)
SPMEIYKTVSAWKRQPVRVLSLFGNIEKELKSLGFLEIGSDSEGGTLKYVEDVTNVVRRDVEKWGPFDLVYGSTNPLGYSCDRCPGWYMFQFHRILQYARPRQESQKPFFWIFMDNLLLTEDDQVTTVRFLQTEAVTLQDVRGRVLQNAVRVWSNIPGLKSKHAVLTPKEEQSLQAQVRTRSKLAAQKDNPLVKICLLPLREYFKCFSQNSLPL

SEQ ID NO: 17 - protein, 214 aa, synthetic construct
  REGION 1..214: note = DNMT3L-5 CD(Mus_musculus)
GPMEIYKTVSAWKRQPVRVLSLFRNIDKVLKSLGFLESGSGSGGGTLKYVEDVTNVVRRDVEKWGPFDLVYGSTQPLGSSCDRCPGWYMFQFHRILQYALPRQESQRPFFWIFMDNLLLTEDDQETTTRFLQTEAVTLQDVRGRDYQNAMRVWSNIPGLKSKHAPLTPKEEEYLQAQVRSRSKLDAPKVDLLVKNCLLPLREYFKYFSQNSLPL

SEQ ID NO: 18 - protein, 214 aa, synthetic construct
  REGION 1..214: note = DNMT3L-6 CD(Mastomys_coucha)
SPIEIYKTVSPWKRQPVRVLSLFGKIDKELKSLGFLESDAGSEGGTLKYVEDVTNVVRRDVEKWGPFDLVYGSTQPFSCSCDHCPGWYMFQFHRILQYARPRQESQRPFFWLFMDHLLLTEDDQVTTTRFLQTEAVTLQDIRGRVLQNAVRVWSNIPGLKSKHTVLTPKEEESLQCQGRTRSKMAAQKLDSLVKHCLIPLREYFKYFSQSSLPL

SEQ ID NO: 19 - protein, 208 aa, synthetic construct
  REGION 1..208: note = DNMT3L-7 CD(Mus_caroli)
GPMEIYKTVSTWKRQPVRVLSLFGNIDKVLKSLGFLESGSGSGGGTLKYVEDVTNVVRRDVEKWGPFDLVYGSTQPLGSSCDRCPGWYMFQFHRILQYALPRQESQRPFFWIFMDNLLMTEDDQETTARFLQTEAVTLQDVRGRDYQNVMRVWSNIPGLKSKHVPLTPKEEEYLQAQVRTRSKLDAQKVDLLVKNCLLPLREYFKYFS

SEQ ID NO: 20 - protein, 215 aa, synthetic construct
  REGION 1..215: note = DNMT3L-8 CD(Rattus_norvegicus)
MSPVEIYKTVSAWKRQPVRVLSLFGNIDKELKSLGFLESSSGSEGGTLKYVEDVTNVVRREVEKWGPFDLVYGSTQPLGYSCDRCPGWYMFQFHRILQYARPRQDSQQPFFWIFVDNLLLTEDDQETTVRFLQTEAVTLQDVRGRVLQNAMRVWSNIPGLKSKHADLTPKEEQSLQTQVRTRSKLAAQKVDSLVKYCLLPLREYFKYFSQNSLPL

SEQ ID NO: 21 - protein, 213 aa, synthetic construct
  REGION 1..213: note = DNMT3L-9 CD(Homo_sapiens)
NPLEMFETVPVWRRQPVRVLSLFEDIKKELTSLGFLESGSDPGQLKHVVDVTDTVRKDVEEWGPFDLVYGATPPLGHTCDRPPSWYLFQFHRLLQYARPKPGSPRPFFWMFVDNLVLNKEDLDVASRFLEMEPVTIPDVHGGSLQNAVRVWSNIPAIRSRHWALVSEEELSLLAQNKQSSKLAAKWPTKLVKNCFLPLREYFKYFSTELTSSL

SEQ ID NO: 22 - protein, 62 aa, synthetic construct
  REGION 1..62: note = KRAB
RTLVTFKDVFVDFTREEWKLLDTAQQIVYRNVMLENYKNLVSLGYQLTKPDVILRLEKGEEP

SEQ ID NO: 23 - protein, 62 aa, synthetic construct
  REGION 1..62: note = Zim3
VTFEDVTVNFTQGEWQRLNPEQRNLYRDVMLENYSNLVSVGQGETTKPDVILRLEQGKEPWL

SEQ ID NO: 24 - protein, 61 aa, synthetic construct
  REGION 1..61: note = Znf680
LTFRDVAIEFSLEEWQCLDTAQRNLYRKVMFENYRNLVFLGIAVSKPHLITCLEQGKEPWN

SEQ ID NO: 25 - protein, 62 aa, synthetic construct
  REGION 1..62: note = Znf554
VTFEDVSMDFSQEEWELLEPAQKNLYREVMLENYRNVVSLEALKNQCTDVGIKEGPLSPAQT

SEQ ID NO: 26 - protein, 61 aa, synthetic construct
  REGION 1..61: note = Znf264
VTFDDVAVTFTKEEWGQLDLAQRTLYQEVMLENCGLLVSLGCPVPKAELICHLEHGQEPWT

SEQ ID NO: 27 - protein, 61 aa, synthetic construct
  REGION 1..61: note = Znf582
ELFRDVAIVFSQEEWQWLAPAQRDLYRDVMLETYSNLVSLGLAVSKPDVISFLEQGKEPWM

SEQ ID NO: 28 - protein, 61 aa, synthetic construct
  REGION 1..61: note = Znf324
MAFEDVAVYFSQEEWGLLDTAQRALYRRVMLDNFALVASLGLSTSRPRVVIQLERGEEPWV

SEQ ID NO: 29 - protein, 62 aa, synthetic construct
  REGION 1..62: note = Znf669
VAFEDVAVNFTQEEWALLDSSQKNLYREVMQETCRNLASVGSQWKDQNIEDHFEKPGKDIRN

SEQ ID NO: 30 - protein, 61 aa, synthetic construct
  REGION 1..61: note = Znf354a
LTFEDVAVLFTRDEWRKLAPSQRNLYRDVMLENYRNLVSLGLPFTKPKVISLLQQGEDPWE

SEQ ID NO: 31 - protein, 61 aa, synthetic construct
  REGION 1..61: note = Znf82
VMFSDVSIDFSPEEWEYLDLEQKDLYRDVMLENYSNLVSLGCFISKPDVISSLEQGKEPWK

SEQ ID NO: 32 - protein, 61 aa, synthetic construct
  REGION 1..61: note = Znf595
VTFRDVAIEFSPEEWKCLDPAQQNLYRDVMLENYRNLVSLGFVISNPDLVTCLEQIKEPCN

SEQ ID NO: 33 - protein, 61 aa, synthetic construct
  REGION 1..61: note = Znf419
VTFEDVAVYFSQEEWRLLDDAQRLLYRNVMLENFTLLASLGLASSKTHEITQLESWEEPFM

SEQ ID NO: 34 - protein, 61 aa, synthetic construct
  REGION 1..61: note = Znf566
VMFSDVSVDFSQEEWECLNDDQRDLYRDVMLENYSNLVSMGHSISKPNVISYLEQGKEPWL

SEQ ID NO: 35 - protein, 61 aa, synthetic construct
  REGION 1..61: note = Zim2
VTFEDVLVDFSPEELSSLSAAQRNLYREVMLENYRNLVSLGHQFSKPDIISRLEEEESYAM

SEQ ID NO: 36 - protein, 383 aa, synthetic construct
  REGION 1..383: note = EHMT2(G9A)
TGSAAIAEVLLNARCDLHAVNYHGDTPLHIAARESYHDCVLLFLSRGANPELRNKEGDTAWDLTPERSDVWFALQLNRKLRLGVGNRAIRTEKIICRDVARGYENVPIPCVNGVDGEPCPEDYKYISENCETSTMNIDRNITHLQHCTCVDDCSSSNCLCGQLSIRCWYDKDGRLLQEFNKIEPPLIFECNQACSCWRNCKNRVVQSGIKVRLQLYRTAKMGWGVRALQTIPQGTFICEYVGELISDAEADVREDDSYLFDLDNKDGEVYCIDARYYGNISRFINHLCDPNIIPVRVFMLHQDLRFPRIAFFSSRDIRTGEELGFDYGDRFWDIKSKYFTCQCGSEKCKHSAEAIALEQSRLARLDPHPELLPELGSLPPVNT

SEQ ID NO: 37 - protein, 411 aa, synthetic construct
  REGION 1..411: note = SUV39H1
AENLKGCSVCCKSSWNQLQDLCRLAKLSCPALGISKRNLYDFEVEYLCDYKKIREQEYYLVKWRGYPDSESTWEPRQNLKCVRILKQFHKDLERELLRRHHRSKTPRHLDPSLANYLVQKAKQRRALRRWEQELNAKRSHLGRITVENEVDLDGPPRAFVYINEYRVGEGITLNQVAVGCECQDCLWAPTGGCCPGASLHKFAYNDQGQVRLRAGLPIYECNSRCRCGYDCPNRVVQKGIRYDLCIFRTDDGRGWGVRTLEKIRKNSFVMEYVGEIITSEEAERRGQIYDRQGATYLFDLDYVEDVYTVDAAYYGNISHFVNHSCDPNLQVYNVFIDNLDERLPRIAFFATRTIRAGEELTFDYNMQVDPVDMESTRMDSNFGLAGLPGSPKKRVRIECKCGTESCRKYLF

SEQ ID NO: 38 - protein, 47 aa, synthetic construct
  REGION 1..47: note = ZFPM1(FOG)
SRRKQSNPRQIKRSLGDMEAREEVQLVGASHMEQKATAPEAPSPPSA

SEQ ID NO: 39 - protein, 834 aa, synthetic construct
  REGION 1..834: note = TRIM28(KAP1)
AASAAAASAAAASAASGSPGPGEGSAGGEKRSTAPSAAASASASAAASSPAGGGAEALELLEHCGVCRERLRPEREPRLLPCLHSACSACLGPAAPAAANSSGDGGAAGDGTVVDCPVCKQQCFSKDIVENYFMRDSGSKAATDAQDANQCCTSCEDNAPATSYCVECSEPLCETCVEAHQRVKYTKDHTVRSTGPAKSRDGERTVYCNVHKHEPLVLFCESCDTLTCRDCQLNAHKDHQYQFLEDAVRNQRKLLASLVKRLGDKHATLQKSTKEVRSSIRQVSDVQKRVQVDVKMAILQIMKELNKRGRVLVNDAQKVTEGQQERLERQHWTMTKIQKHQEHILRFASWALESDNNTALLLSKKLIYFQLHRALKMIVDPVEPHGEMKFQWDLNAWTKSAEAFGKIVAERPGTNSTGPAPMAPPRAPGPLSKQGSGSSQPMEVQEGYGFGSGDDPYSSAEPHVSGVKRSRSGEGEVSGLMRKVPRVSLERLDLDLTADSQPPVFKVFPGSTTEDYNLIVIERGAAAAATGQPGTAPAGTPGAPPLAGMAIVKEEETEAAIGAPPTATEGPETKPVLMALAEGPGAEGPRLASPSGSTSSGLEVVAPEGTSAPGGGPGTLDDSATICRVCQKPGDLVMCNQCEFCFHLDCHLPALQDVPGEEWSCSLCHVLPDLKEEDGSLSLDGADSTGVVAKLSPANQRKCERVLLALFCHEPCRPLHQLATDSTFSLDQPGGTLDLTLIRARLQEKLSPPYSSPQEFAQDVGRMFKQFNKLTEDKADVQSIIGLQRFFETRMNEAFGDTKFSAVLVEPPPMSLPGAGLSSQELSGGPGDGP

SEQ ID NO: 40 - protein, 745 aa, synthetic construct
  REGION 1..745: note = EZH2
GQTGKKSEKGPVCWRKRVKSEYMRLRQLKRFRRADEVKSMFSSNRQKILERTEILNQEWKQRRIQPVHILTSVSSLRGTRECSVTSDLDFPTQVIPLKTLNAVASVPIMYSWSPLQQNFMVEDETVLHNIPYMGDEVLDQDGTFIEELIKNYDGKVHGDRECGFINDEIFVELVNALGQYNDDDDDDDGDDPEEREEKQKDLEDHRDDKESRPPRKFPSDKIFEAISSMFPDKGTAEELKEKYKELTEQQLPGALPPECTPNIDGPNAKSVQREQSLHSFHTLFCRRCFKYDCFLHPFHATPNTYKRKNTETALDNKPCGPQCYQHLEGAKEFAAALTAERIKTPPKRPGGRRRGRLPNNSSRPSTPTINVLESKDTDSDREAGTETGGENNDKEEEEKKDETSSSSEANSRCQTPIKMKPNIEPPENVEWSGAEASMFRVLIGTYYDNFCAIARLIGTKTCRQVYEFRVKESSIIAPAPAEDVDTPPRKKKRKHRLWAAHCRKIQLKKDGSSNHVYNYQPCDHPRQPCDSSCPCVIAQNFCEKFCQCSSECQNRFPGCRCKAQCNTKQCPCYLAVRECDPDLCLTCGAADHWDSKNVSCKNCSIQRGSKKHLLLAPSDVAGWGIFIKDPVQKNEFISEYCGEIISQDEADRRGKVYDKYMCSFLFNLNNDFVVDATRKGNKIRFANHSVNPNCYAKVMMVNGDHRIGIFAKRAIQTGEELFFDYRYSQADALKYVGIEREMEIP

SEQ ID NO: 41 - protein, 219 aa, synthetic construct
  REGION 1..219: note = MXD1(SID FL)
AAAVRMNIQMLLEAADYLERREREAEHGYASMLPYNNKDRDALKRRNKSKKNNSSSRSTHNEMEKNRRAHLRLCLEKLKGLVPLGPESSRHTTLSLLTKAKLHIKKLEDCDRKAVHQIDQLQREQRHLKRQLEKLGIERIRMDSIGSTVSSERSDSDREIDVDVESTDYLTGDLDWSSSSVSDSDERGSMQSLGSDEGYSSTSIKRIKLQDSHKACLGL

SEQ ID NO: 42 - protein, 29 aa, synthetic construct
  REGION 1..29: note = SID
MNIQMLLEAADYLERREREAEHGYASMLP

SEQ ID NO: 43 - protein, 875 aa, synthetic construct
  REGION 1..875: note = LSD1(KDMA1)
LSGKKAAAAAAAAAAAATGTEAGPGTAGGSENGSEVAAQPAGLSGPAEVGPGAVGERTPRKKEPPRASPPGGLAEPPGSAGPQAGPTVVPGSATPMETGIAETPEGRRTSRRKRAKVEYREMDESLANLSEDEYYSEEERNAKAEKEKKLPPPPPQAPPEEENESEPEEPSGQAGGLQDDSSGGYGDGQASGVEGAAFQSRLPHDRMTSQEAACFPDIISGPQQTQKVFLFIRNRTLQLWLDNPKIQLTFEATLQQLEAPYNSDTVLVHRVHSYLERHGLINFGIYKRIKPLPTKKTGKVIIIGSGVSGLAAARQLQSFGMDVTLLEARDRVGGRVATFRKGNYVADLGAMVVTGLGGNPMAVVSKQVNMELAKIKQKCPLYEANGQADTVKVPKEKDEMVEQEFNRLLEATSYLSHQLDFNVLNNKPVSLGQALEVVIQLQEKHVKDEQIEHWKKIVKTQEELKELLNKMVNLKEKIKELHQQYKEASEVKPPRDITAEFLVKSKHRDLTALCKEYDELAETQGKLEEKLQELEANPPSDVYLSSRDRQILDWHFANLEFANATPLSTLSLKHWDQDDDFEFTGSHLTVRNGYSCVPVALAEGLDIKLNTAVRQVRYTASGCEVIAVNTRSTSQTFIYKCDAVLCTLPLGVLKQQPPAVQFVPPLPEWKTSAVQRMGFGNLNKVVLCFDRVFWDPSVNLFGHVGSTTASRGELFLFWNLYKAPILLALVAGEAAGIMENISDDVIVGRCLAILKGIFGSSAVPQPKETVVSRWRADPWARGSYSYVAAGSSGNDYDLMAQPITPGPSIPGAPQPIPRLFFAGEHTIRNYPATVHGALLSGLREAGRIADQFLGAMYTLPRQATPGVPAQQSPSM

SEQ ID NO: 44 - protein, 190 aa, synthetic construct
  REGION 1..190: note = HP1a (long)
GKKTKRTADSSSSEDEEEYVVEKVLDRRVVKGQVEYLLKWKGFSEEHNTWEPEKNLDCPELISEFMKKYKKMKEGENNKPREKSESNKRKSNFSNSADDIKSKKKREQSNDIARGFERGLEPEKIIGATDSCGDLMFLMKWKDTDEADLVLAKEANVKCPQIVIAFYEERLTWHAYPEDAENKEKETAKS

SEQ ID NO: 45 - protein, 119 aa, synthetic construct
  REGION 1..119: note = HP1a (short)
MKEGENNKPREKSESNKRKSNFSNSADDIKSKKKREQSNDIARGFERGLEPEKIIGATDSCGDLMFLMKWKDTDEADLVLAKEANVKCPQIVIAFYEERLTWHAYPEDAENKEKETAKS

SEQ ID NO: 46 - protein, 427 aa, synthetic construct
  REGION 1..427: note = HDAC3
AKTVAYFYDPDVGNFHYGAGHPMKPHRLALTHSLVLHYGLYKKMIVFKPYQASQHDMCRFHSEDYIDFLQRVSPTNMQGFTKSLNAFNVGDDCPVFPGLFEFCSRYTGASLQGATQLNNKICDIAINWAGGLHHAKKFEASGFCYVNDIVIGILELLKYHPRVLYIDIDIHHGDGVQEAFYLTDRVMTVSFHKYGNYFFPGTGDMYEVGAESGRYYCLNVPLRDGIDDQSYKHLFQPVINQVVDFYQPTCIVLQCGADSLGCDRLGCFNLSIRGHGECVEYVKSFNIPLLVLGGGGYTVRNVARCWTYETSLLVEEAISEELPYSEYFEYFAPDFTLHPDVSTRIENQNSRQYLDQIRQTIFENLKMLNHAPSVQIHDVPADLLTYDRTDEADAEERGPEENYSRPEAPNEFYDGDHDNDKESDVEI

SEQ ID NO: 47 - protein, 27 aa, synthetic construct
  REGION 1..27: note = linker1
SSGNSNANSRGPSFSSGLVPLSLRGSH

SEQ ID NO: 48 - protein, 80 aa, synthetic construct
  REGION 1..80: note = linker2_XTEN80
GGPSSGAPPPSGGSPAGSPTSTEEGTSESATPESGPGTSTEPSEGSAPGSPAGSPTSTEEGTSTEPSEGSAPGTSTEPSE

SEQ ID NO: 49 - protein, 17 aa, synthetic construct
  REGION 1..17: note = linker3
GSGSETPGTSESATPES

SEQ ID NO: 50 - protein, 18 aa, synthetic construct
  REGION 1..18: note = linker4
DGSGSETPGTSESATPES

SEQ ID NO: 51 - protein, 16 aa, synthetic construct
  REGION 1..16: note = linker5_XTEN16
SGSETPGTSESATPES

SEQ ID NO: 52 - protein, 96 aa, synthetic construct
  REGION 1..96: note = linker6_NEW XTEN
SGSETPGTSEGGPSSGAPPPSGGSPAGSPTSTEEGTSESATPESGPGTSTEPSEGSAPGSPAGSPTSTEEGTSTEPSEGSAPGTSTEPSESATPES

SEQ ID NO: 53 - protein, 97 aa, synthetic construct
  REGION 1..97: note = linker7_nXTEN1
GGPSSGAPPPSGGSPAGSPTSTEEGTSESATPESGPGTSTEPSEGSAPGSPAGSPTSTEEGTSTEPSEGSAPGTSTEPSEGSGSETPGTSESATPES

SEQ ID NO: 54 - protein, 91 aa, synthetic construct
  REGION 1..91: note = linker8_nXTEN2
GSETPGTSESATPESGPGSPAGSPTSTEEGTSESATPESGPGSEPATSGSETPGTSESATPESGPGTSTEPSEGSAPGTSTEPSESATPES

SEQ ID NO: 55 - protein, 283 aa, synthetic construct
  REGION 1..283: note = linker9_BFP
GGPSSGAPPPSGGSPAGSPTSTEEGTSESATPESGPGHVSELIKENMHMKLYMEGTVDNHHFKCTSEGEGKPYEGTQTMRIKVVEGGPLPFAFDILATSFLYGSKTFINHTQGIPDFFKQSFPEGFTWERVTTYEDGGVLTATQDTSLQDGCLIYNVKIRGVNFTSNGPVMQKKTLGWEAFTETLYPADGGLEGRNDMALKLVGGSHLIANIKTTYRSKKPAKNLKMPGVYYVDYRLERIKEANNETYVEQHEVAVARYCDLPSKLGHKLNGSAPGTSTEPSE

SEQ ID NO: 56 - protein, 128 aa, synthetic construct
  REGION 1..128: note = linker10_Beta1
GGPSSGSELIKENYYVDYRLERIKEANNETYVEQHEVAVARYCDLPSKLGHKLNAPPPSGGSPAGSPTSTEEGTSESATPESGPGTSTEPSEGSAPGSPAGSPTSTEEGTSTEPSEGSAPGTSTEPSE

SEQ ID NO: 57 - protein, 168 aa, synthetic construct
  REGION 1..168: note = linker11_Beta2
GGPSSGSELIKENGLEGRNDMALKLVGGSHLIANIKTTYRSKKPAKNLKMPGVYYVDYRLERIKEANNETYVEQHEVAVARYCDLPSKLGHKLNAPPPSGGSPAGSPTSTEEGTSESATPESGPGTSTEPSEGSAPGSPAGSPTSTEEGTSTEPSEGSAPGTSTEPSE

SEQ ID NO: 58 - protein, 104 aa, synthetic construct
  REGION 1..104: note = linker12_XTEN80-XTEN16
GGPSSGAPPPSGGSPAGSPTSTEEGTSESATPESGPGTSTEPSEGSAPGSPAGSPTSTEEGTSTEPSEGSAPGTSTEPSEPKKKRKVGSGSETPGTSESATPES

SEQ ID NO: 59 - protein, 905 aa, synthetic construct
  REGION 1..905: note = XTEN linker full length
HGEGTFTSDLSKQMEEEAVRLFIEWLKNGGPSSGAPPPSGGSPAGSPTSTEEGTSESATPESGPGTSTEPSEGSAPGSPAGSPTSTEEGTSTEPSEGSAPGTSTEPSEGSAPGTSESATPESGPGSEPATSGSETPGSEPATSGSETPGSPAGSPTSTEEGTSESATPESGPGTSTEPSEGSAPGTSTEPSEGSAPGSPAGSPTSTEEGTSTEPSEGSAPGTSTEPSEGSAPGTSESATPESGPGTSTEPSEGSAPGTSESATPESGPGSEPATSGSETPGTSTEPSEGSAPGTSTEPSEGSAPGTSESATPESGPGTSESATPESGPGSPAGSPTSTEEGTSESATPESGPGSEPATSGSETPGTSESATPESGPGTSTEPSEGSAPGTSTEPSEGSAPGTSTEPSEGSAPGTSTEPSEGSAPGTSTEPSEGSAPGTSTEPSEGSAPGSPAGSPTSTEEGTSTEPSEGSAPGTSESATPESGPGSEPATSGSETPGTSESATPESGPGSEPATSGSETPGTSESATPESGPGTSTEPSEGSAPGTSESATPESGPGSPAGSPTSTEEGSPAGSPTSTEEGSPAGSPTSTEEGTSESATPESGPGTSTEPSEGSAPGTSESATPESGPGSEPATSGSETPGTSESATPESGPGSEPATSGSETPGTSESATPESGPGTSTEPSEGSAPGSPAGSPTSTEEGTSESATPESGPGSEPATSGSETPGTSESATPESGPGSPAGSPTSTEEGSPAGSPTSTEEGTSTEPSEGSAPGTSESATPESGPGTSESATPESGPGTSESATPESGPGSEPATSGSETPGSEPATSGSETPGSPAGSPTSTEEGTSTEPSEGSAPGTSTEPSEGSAPGSEPATSGSETPGTSESATPESGPGTSTEPSEGSAPG

SEQ ID NO: 60 - protein, 2175 aa, synthetic construct
  REGION 1..2175: note = V7 fusion
  SITE 2175: note = misc_feature - Xaa =
MNHDQEFDPPKVYPPVPAEKRKPIRVLSLFDGIATGLLVLKDLGIQVDRYIASEVCEDSITVGMVRHQGKIMYVGDVRSVTQKHIQEWGPFDLVIGGSPCNDLSIVNPARKGLYEGTGRLFFEFYRLLHDARPKEGDDRPFFWLFENVVAMGVSDKRDISRFLESNPVMIDAKEVSAAHRARYFWGNLPGMNRPLASTVNDKLELQECLEHGRIAKFSKVRTITTRSNSIKQGKDQHFPVFMNEKEDILWCTEMERVFGFPVHYTDVSNMSRLARQRLLGRSWSVPVIRHLFAPLKEYFACVSSGNSNANSRGPSFSSGLVPLSLRGSHMGPMEIYKTVSAWKRQPVRVLSLFRNIDKVLKSLGFLESGSGSGGGTLKYVEDVTNVVRRDVEKWGPFDLVYGSTQPLGSSCDRCPGWYMFQFHRILQYALPRQESQRPFFWIFMDNLLLTEDDQETTTRFLQTEAVTLQDVRGRDYQNAMRVWSNIPGLKSKHAPLTPKEEEYLQAQVRSRSKLDAPKVDLLVKNCLLPLREYFKYFSQNSLPLDGSGSETPGTSESATPESMNNSQGRVTFEDVTVNFTQGEWQRLNPEQRNLYRDVMLENYSNLVSVGQGETTKPDVILRLEQGKEPWLEEEEVLGSGRAEKNGDIGGQIWKPKDVKESLGGPSSGAPPPSGGSPAGSPTSTEEGTSESATPESGPGTSTEPSEGSAPGSPAGSPTSTEEGTSTEPSEGSAPGTSTEPSEPKKKRKVMDKKYSIGLAIGTNSVGWAVITDEYKVPSKKFKVLGNTDRHSIKKNLIGALLFDSGETAEATRLKRTARRRYTRRKNRICYLQEIFSNEMAKVDDSFFHRLEESFLVEEDKKHERHPIFGNIVDEVAYHEKYPTIYHLRKKLVDSTDKADLRLIYLALAHMIKFRGHFLIEGDLNPDNSDVDKLFIQLVQTYNQLFEENPINASGVDAKAILSARLSKSRRLENLIAQLPGEKKNGLFGNLIALSLGLTPNFKSNFDLAEDAKLQLSKDTYDDDLDNLLAQIGDQYADLFLAAKNLSDAILLSDILRVNTEITKAPLSASMIKRYDEHHQDLTLLKALVRQQLPEKYKEIFFDQSKNGYAGYIDGGASQEEFYKFIKPILEKMDGTEELLVKLNREDLLRKQRTFDNGSIPHQIHLGELHAILRRQEDFYPFLKDNREKIEKILTFRIPYYVGPLARGNSRFAWMTRKSEETITPWNFEEVVDKGASAQSFIERMTNFDKNLPNEKVLPKHSLLYEYFTVYNELTKVKYVTEGMRKPAFLSGEQKKAIVDLLFKTNRKVTVKQLKEDYFKKIECFDSVEISGVEDRFNASLGTYHDLLKIIKDKDFLDNEENEDILEDIVLTLTLFEDREMIEERLKTYAHLFDDKVMKQLKRRRYTGWGRLSRKLINGIRDKQSGKTILDFLKSDGFANRNFMQLIHDDSLTFKEDIQKAQVSGQGDSLHEHIANLAGSPAIKKGILQTVKVVDELVKVMGRHKPENIVIEMARENQTTQKGQKNSRERMKRIEEGIKELGSQILKEHPVENTQLQNEKLYLYYLQNGRDMYVDQELDINRLSDYDVDAIVPQSFLKDDSIDNKVLTRSDKNRGKSDNVPSEEVVKKMKNYWRQLLNAKLITQRKFDNLTKAERGGLSELDKAGFIKRQLVETRQITKHVAQILDSRMNTKYDENDKLIREVKVITLKSKLVSDFRKDFQFYKVREINNYHHAHDAYLNAVVGTALIKKYPKLESEFVYGDYKVYDVRKMIAKSEQEIGKATAKYFFYSNIMNFFKTEITLANGEIRKRPLIETNGETGEIVWDKGRDFATVRKVLSMPQVNIVKKTEVQTGGFSKESILPKRNSDKLIARKKDWDPKKYGGFDSPTVAYSVLVVAKVEKGKSKKLKSVKELLGITIMERSSFEKNPIDFLEAKGYKEVKKDLIIKLPKYSLFELENGRKRMLASAGELQKGNELALPSKYVNFLYLASHYEKLKGSPEDNEQKQLFVEQHKHYLDEIIEQISEFSKRVILADANLDKVLSAYNKHRDKPIREQAENIIHLFTLTNLGAPAAFKYFDTTIDRKRYTSTKEVLDATLIHQSITGLYETRIDLSQLGGDAYPYDVPDYASLGSGSPKKKRKVEDPKKKRKVDGLEATNFSLLKQAGDVEENPGPMHX

SEQ ID NO: 61 - protein, 2173 aa, synthetic construct
  REGION 1..2173: note = V8 fusion
  SITE 2173: note = misc_feature - Xaa =
MNNSQGRVTFEDVTVNFTQGEWQRLNPEQRNLYRDVMLENYSNLVSVGQGETTKPDVILRLEQGKEPWLEEEEVLGSGRAEKNGDIGGQIWKPKDVKESLSGSETPGTSESATPESMNHDQEFDPPKVYPPVPAEKRKPIRVLSLFDGIATGLLVLKDLGIQVDRYIASEVCEDSITVGMVRHQGKIMYVGDVRSVTQKHIQEWGPFDLVIGGSPCNDLSIVNPARKGLYEGTGRLFFEFYRLLHDARPKEGDDRPFFWLFENVVAMGVSDKRDISRFLESNPVMIDAKEVSAAHRARYFWGNLPGMNRPLASTVNDKLELQECLEHGRIAKFSKVRTITTRSNSIKQGKDQHFPVFMNEKEDILWCTEMERVFGFPVHYTDVSNMSRLARQRLLGRSWSVPVIRHLFAPLKEYFACVSSGNSNANSRGPSFSSGLVPLSLRGSHMGPMEIYKTVSAWKRQPVRVLSLFRNIDKVLKSLGFLESGSGSGGGTLKYVEDVTNVVRRDVEKWGPFDLVYGSTQPLGSSCDRCPGWYMFQFHRILQYALPRQESQRPFFWIFMDNLLLTEDDQETTTRFLQTEAVTLQDVRGRDYQNAMRVWSNIPGLKSKHAPLTPKEEEYLQAQVRSRSKLDAPKVDLLVKNCLLPLREYFKYFSQNSLPLGGPSSGAPPPSGGSPAGSPTSTEEGTSESATPESGPGTSTEPSEGSAPGSPAGSPTSTEEGTSTEPSEGSAPGTSTEPSEPKKKRKVMDKKYSIGLAIGTNSVGWAVITDEYKVPSKKFKVLGNTDRHSIKKNLIGALLFDSGETAEATRLKRTARRRYTRRKNRICYLQEIFSNEMAKVDDSFFHRLEESFLVEEDKKHERHPIFGNIVDEVAYHEKYPTIYHLRKKLVDSTDKADLRLIYLALAHMIKFRGHFLIEGDLNPDNSDVDKLFIQLVQTYNQLFEENPINASGVDAKAILSARLSKSRRLENLIAQLPGEKKNGLFGNLIALSLGLTPNFKSNFDLAEDAKLQLSKDTYDDDLDNLLAQIGDQYADLFLAAKNLSDAILLSDILRVNTEITKAPLSASMIKRYDEHHQDLTLLKALVRQQLPEKYKEIFFDQSKNGYAGYIDGGASQEEFYKFIKPILEKMDGTEELLVKLNREDLLRKQRTFDNGSIPHQIHLGELHAILRRQEDFYPFLKDNREKIEKILTFRIPYYVGPLARGNSRFAWMTRKSEETITPWNFEEVVDKGASAQSFIERMTNFDKNLPNEKVLPKHSLLYEYFTVYNELTKVKYVTEGMRKPAFLSGEQKKAIVDLLFKTNRKVTVKQLKEDYFKKIECFDSVEISGVEDRFNASLGTYHDLLKIIKDKDFLDNEENEDILEDIVLTLTLFEDREMIEERLKTYAHLFDDKVMKQLKRRRYTGWGRLSRKLINGIRDKQSGKTILDFLKSDGFANRNFMQLIHDDSLTFKEDIQKAQVSGQGDSLHEHIANLAGSPAIKKGILQTVKVVDELVKVMGRHKPENIVIEMARENQTTQKGQKNSRERMKRIEEGIKELGSQILKEHPVENTQLQNEKLYLYYLQNGRDMYVDQELDINRLSDYDVDAIVPQSFLKDDSIDNKVLTRSDKNRGKSDNVPSEEVVKKMKNYWRQLLNAKLITQRKFDNLTKAERGGLSELDKAGFIKRQLVETRQITKHVAQILDSRMNTKYDENDKLIREVKVITLKSKLVSDFRKDFQFYKVREINNYHHAHDAYLNAVVGTALIKKYPKLESEFVYGDYKVYDVRKMIAKSEQEIGKATAKYFFYSNIMNFFKTEITLANGEIRKRPLIETNGETGEIVWDKGRDFATVRKVLSMPQVNIVKKTEVQTGGFSKESILPKRNSDKLIARKKDWDPKKYGGFDSPTVAYSVLVVAKVEKGKSKKLKSVKELLGITIMERSSFEKNPIDFLEAKGYKEVKKDLIIKLPKYSLFELENGRKRMLASAGELQKGNELALPSKYVNFLYLASHYEKLKGSPEDNEQKQLFVEQHKHYLDEIIEQISEFSKRVILADANLDKVLSAYNKHRDKPIREQAENIIHLFTLTNLGAPAAFKYFDTTIDRKRYTSTKEVLDATLIHQSITGLYETRIDLSQLGGDAYPYDVPDYASLGSGSPKKKRKVEDPKKKRKVDGLEATNFSLLKQAGDVEENPGPMHX

SEQ ID NO: 62 - protein, 2159 aa, synthetic construct
  REGION 1..2159: note = V9 fusion
  SITE 2159: note = misc_feature - Xaa =
MVPAAKRVKLDGSDKKYSIGLAIGTNSVGWAVITDEYKVPSKKFKVLGNTDRHSIKKNLIGALLFDSGETAEATRLKRTARRRYTRRKNRICYLQEIFSNEMAKVDDSFFHRLEESFLVEEDKKHERHPIFGNIVDEVAYHEKYPTIYHLRKKLVDSTDKADLRLIYLALAHMIKFRGHFLIEGDLNPDNSDVDKLFIQLVQTYNQLFEENPINASGVDAKAILSARLSKSRRLENLIAQLPGEKKNGLFGNLIALSLGLTPNFKSNFDLAEDAKLQLSKDTYDDDLDNLLAQIGDQYADLFLAAKNLSDAILLSDILRVNTEITKAPLSASMIKRYDEHHQDLTLLKALVRQQLPEKYKEIFFDQSKNGYAGYIDGGASQEEFYKFIKPILEKMDGTEELLVKLNREDLLRKQRTFDNGSIPHQIHLGELHAILRRQEDFYPFLKDNREKIEKILTFRIPYYVGPLARGNSRFAWMTRKSEETITPWNFEEVVDKGASAQSFIERMTNFDKNLPNEKVLPKHSLLYEYFTVYNELTKVKYVTEGMRKPAFLSGEQKKAIVDLLFKTNRKVTVKQLKEDYFKKIECFDSVEISGVEDRFNASLGTYHDLLKIIKDKDFLDNEENEDILEDIVLTLTLFEDREMIEERLKTYAHLFDDKVMKQLKRRRYTGWGRLSRKLINGIRDKQSGKTILDFLKSDGFANRNFMQLIHDDSLTFKEDIQKAQVSGQGDSLHEHIANLAGSPAIKKGILQTVKVVDELVKVMGRHKPENIVIEMARENQTTQKGQKNSRERMKRIEEGIKELGSQILKEHPVENTQLQNEKLYLYYLQNGRDMYVDQELDINRLSDYDVDAIVPQSFLKDDSIDNKVLTRSDKNRGKSDNVPSEEVVKKMKNYWRQLLNAKLITQRKFDNLTKAERGGLSELDKAGFIKRQLVETRQITKHVAQILDSRMNTKYDENDKLIREVKVITLKSKLVSDFRKDFQFYKVREINNYHHAHDAYLNAVVGTALIKKYPKLESEFVYGDYKVYDVRKMIAKSEQEIGKATAKYFFYSNIMNFFKTEITLANGEIRKRPLIETNGETGEIVWDKGRDFATVRKVLSMPQVNIVKKTEVQTGGFSKESILPKRNSDKLIARKKDWDPKKYGGFDSPTVAYSVLVVAKVEKGKSKKLKSVKELLGITIMERSSFEKNPIDFLEAKGYKEVKKDLIIKLPKYSLFELENGRKRMLASAGELQKGNELALPSKYVNFLYLASHYEKLKGSPEDNEQKQLFVEQHKHYLDEIIEQISEFSKRVILADANLDKVLSAYNKHRDKPIREQAENIIHLFTLTNLGAPAAFKYFDTTIDRKRYTSTKEVLDATLIHQSITGLYETRIDLSQLGGDAYPYDVPDYASLGSGSPKKKRKVEDPKKKRKVDGGGPSSGAPPPSGGSPAGSPTSTEEGTSESATPESGPGTSTEPSEGSAPGSPAGSPTSTEEGTSTEPSEGSAPGTSTEPSEMNHDQEFDPPKVYPPVPAEKRKPIRVLSLFDGIATGLLVLKDLGIQVDRYIASEVCEDSITVGMVRHQGKIMYVGDVRSVTQKHIQEWGPFDLVIGGSPCNDLSIVNPARKGLYEGTGRLFFEFYRLLHDARPKEGDDRPFFWLFENVVAMGVSDKRDISRFLESNPVMIDAKEVSAAHRARYFWGNLPGMNRPLASTVNDKLELQECLEHGRIAKFSKVRTITTRSNSIKQGKDQHFPVFMNEKEDILWCTEMERVFGFPVHYTDVSNMSRLARQRLLGRSWSVPVIRHLFAPLKEYFACVSSGNSNANSRGPSFSSGLVPLSLRGSHMGPMEIYKTVSAWKRQPVRVLSLFRNIDKVLKSLGFLESGSGSGGGTLKYVEDVTNVVRRDVEKWGPFDLVYGSTQPLGSSCDRCPGWYMFQFHRILQYALPRQESQRPFFWIFMDNLLLTEDDQETTTRFLQTEAVTLQDVRGRDYQNAMRVWSNIPGLKSKHAPLTPKEEEYLQAQVRSRSKLDAPKVDLLVKNCLLPLREYFKYFSQNSLPLDGSGSETPGTSESATPESMNNSQGRVTFEDVTVNFTQGEWQRLNPEQRNLYRDVMLENYSNLVSVGQGETTKPDVILRLEQGKEPWLEEEEVLGSGRAEKNGDIGGQIWKPKDVKESLLEX

SEQ ID NO: 63 - protein, 2407 aa, synthetic construct
  REGION 1..2407: note = V10 fusion
  SITE 2407: note = misc_feature - Xaa =
MPKKKRKVMDKKYSIGLAIGTNSVGWAVITDEYKVPSKKFKVLGNTDRHSIKKNLIGALLFDSGETAEATRLKRTARRRYTRRKNRICYLQEIFSNEMAKVDDSFFHRLEESFLVEEDKKHERHPIFGNIVDEVAYHEKYPTIYHLRKKLVDSTDKADLRLIYLALAHMIKFRGHFLIEGDLNPDNSDVDKLFIQLVQTYNQLFEENPINASGVDAKAILSARLSKSRRLENLIAQLPGEKKNGLFGNLIALSLGLTPNFKSNFDLAEDAKLQLSKDTYDDDLDNLLAQIGDQYADLFLAAKNLSDAILLSDILRVNTEITKAPLSASMIKRYDEHHQDLTLLKALVRQQLPEKYKEIFFDQSKNGYAGYIDGGASQEEFYKFIKPILEKMDGTEELLVKLNREDLLRKQRTFDNGSIPHQIHLGELHAILRRQEDFYPFLKDNREKIEKILTFRIPYYVGPLARGNSRFAWMTRKSEETITPWNFEEVVDKGASAQSFIERMTNFDKNLPNEKVLPKHSLLYEYFTVYNELTKVKYVTEGMRKPAFLSGEQKKAIVDLLFKTNRKVTVKQLKEDYFKKIECFDSVEISGVEDRFNASLGTYHDLLKIIKDKDFLDNEENEDILEDIVLTLTLFEDREMIEERLKTYAHLFDDKVMKQLKRRRYTGWGRLSRKLINGIRDKQSGKTILDFLKSDGFANRNFMQLIHDDSLTFKEDIQKAQVSGQGDSLHEHIANLAGSPAIKKGILQTVKVVDELVKVMGRHKPENIVIEMARENQTTQKGQKNSRERMKRIEEGIKELGSQILKEHPVENTQLQNEKLYLYYLQNGRDMYVDQELDINRLSDYDVDAIVPQSFLKDDSIDNKVLTRSDKNRGKSDNVPSEEVVKKMKNYWRQLLNAKLITQRKFDNLTKAERGGLSELDKAGFIKRQLVETRQITKHVAQILDSRMNTKYDENDKLIREVKVITLKSKLVSDFRKDFQFYKVREINNYHHAHDAYLNAVVGTALIKKYPKLESEFVYGDYKVYDVRKMIAKSEQEIGKATAKYFFYSNIMNFFKTEITLANGEIRKRPLIETNGETGEIVWDKGRDFATVRKVLSMPQVNIVKKTEVQTGGFSKESILPKRNSDKLIARKKDWDPKKYGGFDSPTVAYSVLVVAKVEKGKSKKLKSVKELLGITIMERSSFEKNPIDFLEAKGYKEVKKDLIIKLPKYSLFELENGRKRMLASAGELQKGNELALPSKYVNFLYLASHYEKLKGSPEDNEQKQLFVEQHKHYLDEIIEQISEFSKRVILADANLDKVLSAYNKHRDKPIREQAENIIHLFTLTNLGAPAAFKYFDTTIDRKRYTSTKEVLDATLIHQSITGLYETRIDLSQLGGDAYPYDVPDYASLGSGSPKKKRKVEDPKKKRKVDGGGPSSGAPPPSGGSPAGSPTSTEEGTSESATPESGPGTSTEPSEGSAPGSPAGSPTSTEEGTSTEPSEGSAPGTSTEPSEMNNSQGRVTFEDVTVNFTQGEWQRLNPEQRNLYRDVMLENYSNLVSVGQGETTKPDVILRLEQGKEPWLEEEEVLGSGRAEKNGDIGGQIWKPKDVKESLSGSETPGTSESATPESMNHDQEFDPPKVYPPVPAEKRKPIRVLSLFDGIATGLLVLKDLGIQVDRYIASEVCEDSITVGMVRHQGKIMYVGDVRSVTQKHIQEWGPFDLVIGGSPCNDLSIVNPARKGLYEGTGRLFFEFYRLLHDARPKEGDDRPFFWLFENVVAMGVSDKRDISRFLESNPVMIDAKEVSAAHRARYFWGNLPGMNRPLASTVNDKLELQECLEHGRIAKFSKVRTITTRSNSIKQGKDQHFPVFMNEKEDILWCTEMERVFGFPVHYTDVSNMSRLARQRLLGRSWSVPVIRHLFAPLKEYFACVSSGNSNANSRGPSFSSGLVPLSLRGSHMGPMEIYKTVSAWKRQPVRVLSLFRNIDKVLKSLGFLESGSGSGGGTLKYVEDVTNVVRRDVEKWGPFDLVYGSTQPLGSSCDRCPGWYMFQFHRILQYALPRQESQRPFFWIFMDNLLLTEDDQETTTRFLQTEAVTLQDVRGRDYQNAMRVWSNIPGLKSKHAPLTPKEEEYLQAQVRSRSKLDAPKVDLLVKNCLLPLREYFKYFSQNSLPLLEATNFSLLKQAGDVEENPGPMHVSELIKENMHMKLYMEGTVDNHHFKCTSEGEGKPYEGTQTMRIKVVEGGPLPFAFDILATSFLYGSKTFINHTQGIPDFFKQSFPEGFTWERVTTYEDGGVLTATQDTSLQDGCLIYNVKIRGVNFTSNGPVMQKKTLGWEAFTETLYPADGGLEGRNDMALKLVGGSHLIANIKTTYRSKKPAKNLKMPGVYYVDYRLERIKEANNETYVEQHEVAVARYCDLPSKLGHKLNX

SEQ ID NO: 64 - protein, 2407 aa, synthetic construct
  REGION 1..2407: note = V11 fusion
  SITE 2407: note = misc_feature - Xaa =
MPKKKRKVMDKKYSIGLAIGTNSVGWAVITDEYKVPSKKFKVLGNTDRHSIKKNLIGALLFDSGETAEATRLKRTARRRYTRRKNRICYLQEIFSNEMAKVDDSFFHRLEESFLVEEDKKHERHPIFGNIVDEVAYHEKYPTIYHLRKKLVDSTDKADLRLIYLALAHMIKFRGHFLIEGDLNPDNSDVDKLFIQLVQTYNQLFEENPINASGVDAKAILSARLSKSRRLENLIAQLPGEKKNGLFGNLIALSLGLTPNFKSNFDLAEDAKLQLSKDTYDDDLDNLLAQIGDQYADLFLAAKNLSDAILLSDILRVNTEITKAPLSASMIKRYDEHHQDLTLLKALVRQQLPEKYKEIFFDQSKNGYAGYIDGGASQEEFYKFIKPILEKMDGTEELLVKLNREDLLRKQRTFDNGSIPHQIHLGELHAILRRQEDFYPFLKDNREKIEKILTFRIPYYVGPLARGNSRFAWMTRKSEETITPWNFEEVVDKGASAQSFIERMTNFDKNLPNEKVLPKHSLLYEYFTVYNELTKVKYVTEGMRKPAFLSGEQKKAIVDLLFKTNRKVTVKQLKEDYFKKIECFDSVEISGVEDRFNASLGTYHDLLKIIKDKDFLDNEENEDILEDIVLTLTLFEDREMIEERLKTYAHLFDDKVMKQLKRRRYTGWGRLSRKLINGIRDKQSGKTILDFLKSDGFANRNFMQLIHDDSLTFKEDIQKAQVSGQGDSLHEHIANLAGSPAIKKGILQTVKVVDELVKVMGRHKPENIVIEMARENQTTQKGQKNSRERMKRIEEGIKELGSQILKEHPVENTQLQNEKLYLYYLQNGRDMYVDQELDINRLSDYDVDAIVPQSFLKDDSIDNKVLTRSDKNRGKSDNVPSEEVVKKMKNYWRQLLNAKLITQRKFDNLTKAERGGLSELDKAGFIKRQLVETRQITKHVAQILDSRMNTKYDENDKLIREVKVITLKSKLVSDFRKDFQFYKVREINNYHHAHDAYLNAVVGTALIKKYPKLESEFVYGDYKVYDVRKMIAKSEQEIGKATAKYFFYSNIMNFFKTEITLANGEIRKRPLIETNGETGEIVWDKGRDFATVRKVLSMPQVNIVKKTEVQTGGFSKESILPKRNSDKLIARKKDWDPKKYGGFDSPTVAYSVLVVAKVEKGKSKKLKSVKELLGITIMERSSFEKNPIDFLEAKGYKEVKKDLIIKLPKYSLFELENGRKRMLASAGELQKGNELALPSKYVNFLYLASHYEKLKGSPEDNEQKQLFVEQHKHYLDEIIEQISEFSKRVILADANLDKVLSAYNKHRDKPIREQAENIIHLFTLTNLGAPAAFKYFDTTIDRKRYTSTKEVLDATLIHQSITGLYETRIDLSQLGGDAYPYDVPDYASLGSGSPKKKRKVEDPKKKRKVDGGGPSSGAPPPSGGSPAGSPTSTEEGTSESATPESGPGTSTEPSEGSAPGSPAGSPTSTEEGTSTEPSEGSAPGTSTEPSEMNNSQGRVTFEDVTVNFTQGEWQRLNPEQRNLYRDVMLENYSNLVSVGQGETTKPDVILRLEQGKEPWLEEEEVLGSGRAEKNGDIGGQIWKPKDVKESLSGSETPGTSESATPESMGPMEIYKTVSAWKRQPVRVLSLFRNIDKVLKSLGFLESGSGSGGGTLKYVEDVTNVVRRDVEKWGPFDLVYGSTQPLGSSCDRCPGWYMFQFHRILQYALPRQESQRPFFWIFMDNLLLTEDDQETTTRFLQTEAVTLQDVRGRDYQNAMRVWSNIPGLKSKHAPLTPKEEEYLQAQVRSRSKLDAPKVDLLVKNCLLPLREYFKYFSQNSLPLSSGNSNANSRGPSFSSGLVPLSLRGSHMNHDQEFDPPKVYPPVPAEKRKPIRVLSLFDGIATGLLVLKDLGIQVDRYIASEVCEDSITVGMVRHQGKIMYVGDVRSVTQKHIQEWGPFDLVIGGSPCNDLSIVNPARKGLYEGTGRLFFEFYRLLHDARPKEGDDRPFFWLFENVVAMGVSDKRDISRFLESNPVMIDAKEVSAAHRARYFWGNLPGMNRPLASTVNDKLELQECLEHGRIAKFSKVRTITTRSNSIKQGKDQHFPVFMNEKEDILWCTEMERVFGFPVHYTDVSNMSRLARQRLLGRSWSVPVIRHLFAPLKEYFACVLEATNFSLLKQAGDVEENPGPMHVSELIKENMHMKLYMEGTVDNHHFKCTSEGEGKPYEGTQTMRIKVVEGGPLPFAFDILATSFLYGSKTFINHTQGIPDFFKQSFPEGFTWERVTTYEDGGVLTATQDTSLQDGCLIYNVKIRGVNFTSNGPVMQKKTLGWEAFTETLYPADGGLEGRNDMALKLVGGSHLIANIKTTYRSKKPAKNLKMPGVYYVDYRLERIKEANNETYVEQHEVAVARYCDLPSKLGHKLNX

SEQ ID NO: 65 - protein, 2451 aa, synthetic construct
  REGION 1..2451: note = V14 fusion
  SITE 2451: note = misc_feature - Xaa =
MPKKKRKVMDKKYSIGLAIGTNSVGWAVITDEYKVPSKKFKVLGNTDRHSIKKNLIGALLFDSGETAEATRLKRTARRRYTRRKNRICYLQEIFSNEMAKVDDSFFHRLEESFLVEEDKKHERHPIFGNIVDEVAYHEKYPTIYHLRKKLVDSTDKADLRLIYLALAHMIKFRGHFLIEGDLNPDNSDVDKLFIQLVQTYNQLFEENPINASGVDAKAILSARLSKSRRLENLIAQLPGEKKNGLFGNLIALSLGLTPNFKSNFDLAEDAKLQLSKDTYDDDLDNLLAQIGDQYADLFLAAKNLSDAILLSDILRVNTEITKAPLSASMIKRYDEHHQDLTLLKALVRQQLPEKYKEIFFDQSKNGYAGYIDGGASQEEFYKFIKPILEKMDGTEELLVKLNREDLLRKQRTFDNGSIPHQIHLGELHAILRRQEDFYPFLKDNREKIEKILTFRIPYYVGPLARGNSRFAWMTRKSEETITPWNFEEVVDKGASAQSFIERMTNFDKNLPNEKVLPKHSLLYEYFTVYNELTKVKYVTEGMRKPAFLSGEQKKAIVDLLFKTNRKVTVKQLKEDYFKKIECFDSVEISGVEDRFNASLGTYHDLLKIIKDKDFLDNEENEDILEDIVLTLTLFEDREMIEERLKTYAHLFDDKVMKQLKRRRYTGWGRLSRKLINGIRDKQSGKTILDFLKSDGFANRNFMQLIHDDSLTFKEDIQKAQVSGQGDSLHEHIANLAGSPAIKKGILQTVKVVDELVKVMGRHKPENIVIEMARENQTTQKGQKNSRERMKRIEEGIKELGSQILKEHPVENTQLQNEKLYLYYLQNGRDMYVDQELDINRLSDYDVDAIVPQSFLKDDSIDNKVLTRSDKNRGKSDNVPSEEVVKKMKNYWRQLLNAKLITQRKFDNLTKAERGGLSELDKAGFIKRQLVETRQITKHVAQILDSRMNTKYDENDKLIREVKVITLKSKLVSDFRKDFQFYKVREINNYHHAHDAYLNAVVGTALIKKYPKLESEFVYGDYKVYDVRKMIAKSEQEIGKATAKYFFYSNIMNFFKTEITLANGEIRKRPLIETNGETGEIVWDKGRDFATVRKVLSMPQVNIVKKTEVQTGGFSKESILPKRNSDKLIARKKDWDPKKYGGFDSPTVAYSVLVVAKVEKGKSKKLKSVKELLGITIMERSSFEKNPIDFLEAKGYKEVKKDLIIKLPKYSLFELENGRKRMLASAGELQKGNELALPSKYVNFLYLASHYEKLKGSPEDNEQKQLFVEQHKHYLDEIIEQISEFSKRVILADANLDKVLSAYNKHRDKPIREQAENIIHLFTLTNLGAPAAFKYFDTTIDRKRYTSTKEVLDATLIHQSITGLYETRIDLSQLGGDAYPYDVPDYASLGSGSPKKKRKVEDPKKKRKVDGGGPSSGAPPPSGGSPAGSPTSTEEGTSESATPESGPGTSTEPSEGSAPGSPAGSPTSTEEGTSTEPSEGSAPGTSTEPSEMNNSQGRVTFEDVTVNFTQGEWQRLNPEQRNLYRDVMLENYSNLVSVGQGETTKPDVILRLEQGKEPWLEEEEVLGSGRAEKNGDIGGQIWKPKDVKESLSGSETPGTSEGGPSSGAPPPSGGSPAGSPTSTEEGTSTEPSEGSAPGTSTEPSESATPESMGPMEIYKTVSAWKRQPVRVLSLFRNIDKVLKSLGFLESGSGSGGGTLKYVEDVTNVVRRDVEKWGPFDLVYGSTQPLGSSCDRCPGWYMFQFHRILQYALPRQESQRPFFWIFMDNLLLTEDDQETTTRFLQTEAVTLQDVRGRDYQNAMRVWSNIPGLKSKHAPLTPKEEEYLQAQVRSRSKLDAPKVDLLVKNCLLPLREYFKYFSQNSLPLSSGNSNANSRGPSFSSGLVPLSLRGSHMNHDQEFDPPKVYPPVPAEKRKPIRVLSLFDGIATGLLVLKDLGIQVDRYIASEVCEDSITVGMVRHQGKIMYVGDVRSVTQKHIQEWGPFDLVIGGSPCNDLSIVNPARKGLYEGTGRLFFEFYRLLHDARPKEGDDRPFFWLFENVVAMGVSDKRDISRFLESNPVMIDAKEVSAAHRARYFWGNLPGMNRPLASTVNDKLELQECLEHGRIAKFSKVRTITTRSNSIKQGKDQHFPVFMNEKEDILWCTEMERVFGFPVHYTDVSNMSRLARQRLLGRSWSVPVIRHLFAPLKEYFACVLEATNFSLLKQAGDVEENPGPMHVSELIKENMHMKLYMEGTVDNHHFKCTSEGEGKPYEGTQTMRIKVVEGGPLPFAFDILATSFLYGSKTFINHTQGIPDFFKQSFPEGFTWERVTTYEDGGVLTATQDTSLQDGCLIYNVKIRGVNFTSNGPVMQKKTLGWEAFTETLYPADGGLEGRNDMALKLVGGSHLIANIKTTYRSKKPAKNLKMPGVYYVDYRLERIKEANNETYVEQHEVAVARYCDLPSKLGHKLNX

SEQ ID NO: 66 - protein, 2231 aa, synthetic construct
  REGION 1..2231: note = V15 fusion
  SITE 2231: note = misc_feature - Xaa =
MVPAAKRVKLDGSDKKYSIGLAIGTNSVGWAVITDEYKVPSKKFKVLGNTDRHSIKKNLIGALLFDSGETAEATRLKRTARRRYTRRKNRICYLQEIFSNEMAKVDDSFFHRLEESFLVEEDKKHERHPIFGNIVDEVAYHEKYPTIYHLRKKLVDSTDKADLRLIYLALAHMIKFRGHFLIEGDLNPDNSDVDKLFIQLVQTYNQLFEENPINASGVDAKAILSARLSKSRRLENLIAQLPGEKKNGLFGNLIALSLGLTPNFKSNFDLAEDAKLQLSKDTYDDDLDNLLAQIGDQYADLFLAAKNLSDAILLSDILRVNTEITKAPLSASMIKRYDEHHQDLTLLKALVRQQLPEKYKEIFFDQSKNGYAGYIDGGASQEEFYKFIKPILEKMDGTEELLVKLNREDLLRKQRTFDNGSIPHQIHLGELHAILRRQEDFYPFLKDNREKIEKILTFRIPYYVGPLARGNSRFAWMTRKSEETITPWNFEEVVDKGASAQSFIERMTNFDKNLPNEKVLPKHSLLYEYFTVYNELTKVKYVTEGMRKPAFLSGEQKKAIVDLLFKTNRKVTVKQLKEDYFKKIECFDSVEISGVEDRFNASLGTYHDLLKIIKDKDFLDNEENEDILEDIVLTLTLFEDREMIEERLKTYAHLFDDKVMKQLKRRRYTGWGRLSRKLINGIRDKQSGKTILDFLKSDGFANRNFMQLIHDDSLTFKEDIQKAQVSGQGDSLHEHIANLAGSPAIKKGILQTVKVVDELVKVMGRHKPENIVIEMARENQTTQKGQKNSRERMKRIEEGIKELGSQILKEHPVENTQLQNEKLYLYYLQNGRDMYVDQELDINRLSDYDVDAIVPQSFLKDDSIDNKVLTRSDKNRGKSDNVPSEEVVKKMKNYWRQLLNAKLITQRKFDNLTKAERGGLSELDKAGFIKRQLVETRQITKHVAQILDSRMNTKYDENDKLIREVKVITLKSKLVSDFRKDFQFYKVREINNYHHAHDAYLNAVVGTALIKKYPKLESEFVYGDYKVYDVRKMIAKSEQEIGKATAKYFFYSNIMNFFKTEITLANGEIRKRPLIETNGETGEIVWDKGRDFATVRKVLSMPQVNIVKKTEVQTGGFSKESILPKRNSDKLIARKKDWDPKKYGGFDSPTVAYSVLVVAKVEKGKSKKLKSVKELLGITIMERSSFEKNPIDFLEAKGYKEVKKDLIIKLPKYSLFELENGRKRMLASAGELQKGNELALPSKYVNFLYLASHYEKLKGSPEDNEQKQLFVEQHKHYLDEIIEQISEFSKRVILADANLDKVLSAYNKHRDKPIREQAENIIHLFTLTNLGAPAAFKYFDTTIDRKRYTSTKEVLDATLIHQSITGLYETRIDLSQLGGDAYPYDVPDYASLGSGSPKKKRKVEDPKKKRKVDGGGPSSGAPPPSGGSPAGSPTSTEEGTSESATPESGPGTSTEPSEGSAPGSPAGSPTSTEEGTSTEPSEGSAPGTSTEPSEMNNSQGRVTFEDVTVNFTQGEWQRLNPEQRNLYRDVMLENYSNLVSVGQGETTKPDVILRLEQGKEPWLEEEEVLGSGRAEKNGDIGGQIWKPKDVKESLSGSETPGTSESATPESGPGSPAGSPTSTEEGTSESATPESGPGSEPATSGSETPGTSESATPESGPGTSTEPSEGSAPGTSTEPSESATPESMGPMEIYKTVSAWKRQPVRVLSLFRNIDKVLKSLGFLESGSGSGGGTLKYVEDVTNVVRRDVEKWGPFDLVYGSTQPLGSSCDRCPGWYMFQFHRILQYALPRQESQRPFFWIFMDNLLLTEDDQETTTRFLQTEAVTLQDVRGRDYQNAMRVWSNIPGLKSKHAPLTPKEEEYLQAQVRSRSKLDAPKVDLLVKNCLLPLREYFKYFSQNSLPLSSGNSNANSRGPSFSSGLVPLSLRGSHMNHDQEFDPPKVYPPVPAEKRKPIRVLSLFDGIATGLLVLKDLGIQVDRYIASEVCEDSITVGMVRHQGKIMYVGDVRSVTQKHIQEWGPFDLVIGGSPCNDLSIVNPARKGLYEGTGRLFFEFYRLLHDARPKEGDDRPFFWLFENVVAMGVSDKRDISRFLESNPVMIDAKEVSAAHRARYFWGNLPGMNRPLASTVNDKLELQECLEHGRIAKFSKVRTITTRSNSIKQGKDQHFPVFMNEKEDILWCTEMERVFGFPVHYTDVSNMSRLARQRLLGRSWSVPVIRHLFAPLKEYFACVX

SEQ ID NO: 67 - protein, 2230 aa, synthetic construct
  REGION 1..2230: note = V16 fusion
  SITE 2230: note = misc_feature - Xaa =
MVPAAKRVKLDGSDKKYSIGLAIGTNSVGWAVITDEYKVPSKKFKVLGNTDRHSIKKNLIGALLFDSGETAEATRLKRTARRRYTRRKNRICYLQEIFSNEMAKVDDSFFHRLEESFLVEEDKKHERHPIFGNIVDEVAYHEKYPTIYHLRKKLVDSTDKADLRLIYLALAHMIKFRGHFLIEGDLNPDNSDVDKLFIQLVQTYNQLFEENPINASGVDAKAILSARLSKSRRLENLIAQLPGEKKNGLFGNLIALSLGLTPNFKSNFDLAEDAKLQLSKDTYDDDLDNLLAQIGDQYADLFLAAKNLSDAILLSDILRVNTEITKAPLSASMIKRYDEHHQDLTLLKALVRQQLPEKYKEIFFDQSKNGYAGYIDGGASQEEFYKFIKPILEKMDGTEELLVKLNREDLLRKQRTFDNGSIPHQIHLGELHAILRRQEDFYPFLKDNREKIEKILTFRIPYYVGPLARGNSRFAWMTRKSEETITPWNFEEVVDKGASAQSFIERMTNFDKNLPNEKVLPKHSLLYEYFTVYNELTKVKYVTEGMRKPAFLSGEQKKAIVDLLFKTNRKVTVKQLKEDYFKKIECFDSVEISGVEDRFNASLGTYHDLLKIIKDKDFLDNEENEDILEDIVLTLTLFEDREMIEERLKTYAHLFDDKVMKQLKRRRYTGWGRLSRKLINGIRDKQSGKTILDFLKSDGFANRNFMQLIHDDSLTFKEDIQKAQVSGQGDSLHEHIANLAGSPAIKKGILQTVKVVDELVKVMGRHKPENIVIEMARENQTTQKGQKNSRERMKRIEEGIKELGSQILKEHPVENTQLQNEKLYLYYLQNGRDMYVDQELDINRLSDYDVDAIVPQSFLKDDSIDNKVLTRSDKNRGKSDNVPSEEVVKKMKNYWRQLLNAKLITQRKFDNLTKAERGGLSELDKAGFIKRQLVETRQITKHVAQILDSRMNTKYDENDKLIREVKVITLKSKLVSDFRKDFQFYKVREINNYHHAHDAYLNAVVGTALIKKYPKLESEFVYGDYKVYDVRKMIAKSEQEIGKATAKYFFYSNIMNFFKTEITLANGEIRKRPLIETNGETGEIVWDKGRDFATVRKVLSMPQVNIVKKTEVQTGGFSKESILPKRNSDKLIARKKDWDPKKYGGFDSPTVAYSVLVVAKVEKGKSKKLKSVKELLGITIMERSSFEKNPIDFLEAKGYKEVKKDLIIKLPKYSLFELENGRKRMLASAGELQKGNELALPSKYVNFLYLASHYEKLKGSPEDNEQKQLFVEQHKHYLDEIIEQISEFSKRVILADANLDKVLSAYNKHRDKPIREQAENIIHLFTLTNLGAPAAFKYFDTTIDRKRYTSTKEVLDATLIHQSITGLYETRIDLSQLGGDAYPYDVPDYASLGSGSPKKKRKVEDPKKKRKVDGGGPSSGAPPPSGGSPAGSPTSTEEGTSESATPESGPGTSTEPSEGSAPGSPAGSPTSTEEGTSTEPSEGSAPGTSTEPSEMNNSQGRVTFEDVTVNFTQGEWQRLNPEQRNLYRDVMLENYSNLVSVGQGETTKPDVILRLEQGKEPWLEEEEVLGSGRAEKNGDIGGQIWKPKDVKESLSGSETPGTSEGGPSSGAPPPSGGSPAGSPTSTEEGTSESATPESGPGTSTEPSEGSAPGSPAGSPTSTEEGTSTEPSEGSAPGTSTEPSESATPESMFETVPVWRRQPVRVLSLFEDIKKELTSLGFLESGSDPGQLKHVVDVTDTVRKDVEEWGPFDLVYGATPPLGHTCDRPPSWYLFQFHRLLQYARPKPGSPRPFFWMFVDNLVLNKEDLDVASRFLEMEPVTIPDVHGGSLQNAVRVWSNIPAIRSSRHWALVSEEELSLLAQNKQSSKLAAKWPTKLVKNCFLPLREYFKYFSTELTSSLSSGNSNANSRGPSFSSGLVPLSLRGSHMNHDQEFDPPKVYPPVPAEKRKPIRVLSLFDGIATGLLVLKDLGIQVDRYIASEVCEDSITVGMVRHQGKIMYVGDVRSVTQKHIQEWGPFDLVIGGSPCNDLSIVNPARKGLYEGTGRLFFEFYRLLHDARPKEGDDRPFFWLFENVVAMGVSDKRDISRFLESNPVMIDAKEVSAAHRARYFWGNLPGMNRPLASTVNDKLELQECLEHGRIAKFSKVRTITTRSNSIKQGKDQHFPVFMNEKEDILWCTEMERVFGFPVHYTDVSNMSRLARQRLLGRSWSVPVIRHLFAPLKEYFACVX

SEQ ID NO: 68 - protein, 2163 aa, synthetic construct
  REGION 1..2163: note = V17 fusion
  SITE 2163: note = misc_feature - Xaa =
MPAAKRVKLDGSNHDQEFDPPKVYPPVPAEKRKPIRVLSLFDGIATGLLVLKDLGIQVDRYIASEVCEDSITVGMVRHQGKIMYVGDVRSVTQKHIQEWGPFDLVIGGSPCNDLSIVNPARKGLYEGTGRLFFEFYRLLHDARPKEGDDRPFFWLFENVVAMGVSDKRDISRFLESNPVMIDAKEVSAAHRARYFWGNLPGMNRPLASTVNDKLELQECLEHGRIAKFSKVRTITTRSNSIKQGKDQHFPVFMNEKEDILWCTEMERVFGFPVHYTDVSNMSRLARQRLLGRSWSVPVIRHLFAPLKEYFACVSSGNSNANSRGPSFSSGLVPLSLRGSHMGPMEIYKTVSAWKRQPVRVLSLFRNIDKVLKSLGFLESGSGSGGGTLKYVEDVTNVVRRDVEKWGPFDLVYGSTQPLGSSCDRCPGWYMFQFHRILQYALPRQESQRPFFWIFMDNLLLTEDDQETTTRFLQTEAVTLQDVRGRDYQNAMRVWSNIPGLKSKHAPLTPKEEEYLQAQVRSRSKLDAPKVDLLVKNCLLPLREYFKYFSQNSLPLGGPSSGAPPPSGGSPAGSPTSTEEGTSESATPESGPGTSTEPSEGSAPGSPAGSPTSTEEGTSTEPSEGSAPGTSTEPSEPKKKRKVMDKKYSIGLAIGTNSVGWAVITDEYKVPSKKFKVLGNTDRHSIKKNLIGALLFDSGETAEATRLKRTARRRYTRRKNRICYLQEIFSNEMAKVDDSFFHRLEESFLVEEDKKHERHPIFGNIVDEVAYHEKYPTIYHLRKKLVDSTDKADLRLIYLALAHMIKFRGHFLIEGDLNPDNSDVDKLFIQLVQTYNQLFEENPINASGVDAKAILSARLSKSRRLENLIAQLPGEKKNGLFGNLIALSLGLTPNFKSNFDLAEDAKLQLSKDTYDDDLDNLLAQIGDQYADLFLAAKNLSDAILLSDILRVNTEITKAPLSASMIKRYDEHHQDLTLLKALVRQQLPEKYKEIFFDQSKNGYAGYIDGGASQEEFYKFIKPILEKMDGTEELLVKLNREDLLRKQRTFDNGSIPHQIHLGELHAILRRQEDFYPFLKDNREKIEKILTFRIPYYVGPLARGNSRFAWMTRKSEETITPWNFEEVVDKGASAQSFIERMTNFDKNLPNEKVLPKHSLLYEYFTVYNELTKVKYVTEGMRKPAFLSGEQKKAIVDLLFKTNRKVTVKQLKEDYFKKIECFDSVEISGVEDRFNASLGTYHDLLKIIKDKDFLDNEENEDILEDIVLTLTLFEDREMIEERLKTYAHLFDDKVMKQLKRRRYTGWGRLSRKLINGIRDKQSGKTILDFLKSDGFANRNFMQLIHDDSLTFKEDIQKAQVSGQGDSLHEHIANLAGSPAIKKGILQTVKVVDELVKVMGRHKPENIVIEMARENQTTQKGQKNSRERMKRIEEGIKELGSQILKEHPVENTQLQNEKLYLYYLQNGRDMYVDQELDINRLSDYDVDAIVPQSFLKDDSIDNKVLTRSDKNRGKSDNVPSEEVVKKMKNYWRQLLNAKLITQRKFDNLTKAERGGLSELDKAGFIKRQLVETRQITKHVAQILDSRMNTKYDENDKLIREVKVITLKSKLVSDFRKDFQFYKVREINNYHHAHDAYLNAVVGTALIKKYPKLESEFVYGDYKVYDVRKMIAKSEQEIGKATAKYFFYSNIMNFFKTEITLANGEIRKRPLIETNGETGEIVWDKGRDFATVRKVLSMPQVNIVKKTEVQTGGFSKESILPKRNSDKLIARKKDWDPKKYGGFDSPTVAYSVLVVAKVEKGKSKKLKSVKELLGITIMERSSFEKNPIDFLEAKGYKEVKKDLIIKLPKYSLFELENGRKRMLASAGELQKGNELALPSKYVNFLYLASHYEKLKGSPEDNEQKQLFVEQHKHYLDEIIEQISEFSKRVILADANLDKVLSAYNKHRDKPIREQAENIIHLFTLTNLGAPAAFKYFDTTIDRKRYTSTKEVLDATLIHQSITGLYETRIDLSQLGGDAYPYDVPDYASLGSGSPKKKRKVEDPKKKRKVDGSGSETPGTSESATPESMNNSQGRVTFEDVTVNFTQGEWQRLNPEQRNLYRDVMLENYSNLVSVGQGETTKPDVILRLEQGKEPWLEEEEVLGSGRAEKNGDIGGQIWKPKDVKESLLEX

SEQ ID NO: 69 - protein, 2111 aa, synthetic construct
  REGION 1..2111: note = V18 fusion
  SITE 2111: note = misc_feature - Xaa =
MPAAKRVKLDGSNHDQEFDPPKVYPPVPAEKRKPIRVLSLFDGIATGLLVLKDLGIQVDRYIASEVCEDSITVGMVRHQGKIMYVGDVRSVTQKHIQEWGPFDLVIGGSPCNDLSIVNPARKGLYEGTGRLFFEFYRLLHDARPKEGDDRPFFWLFENVVAMGVSDKRDISRFLESNPVMIDAKEVSAAHRARYFWGNLPGMNRPLASTVNDKLELQECLEHGRIAKFSKVRTITTRSNSIKQGKDQHFPVFMNEKEDILWCTEMERVFGFPVHYTDVSNMSRLARQRLLGRSWSVPVIRHLFAPLKEYFACVSSGNSNANSRGPSFSSGLVPLSLRGSHMFETVPVWRRQPVRVLSLFEDIKKELTSLGFLESGSDPGQLKHVVDVTDTVRKDVEEWGPFDLVYGATPPLGHTCDRPPSWYLFQFHRLLQYARPKPGSPRPFFWMFVDNLVLNKEDLDVASRFLEMEPVTIPDVHGGSLQNAVRVWSNIPAIRSSRHWALVSEEELSLLAQNKQSSKLAAKWPTKLVKNCFLPLREYFKYFSGGPSSGAPPPSGGSPAGSPTSTEEGTSESATPESGPGTSTEPSEGSAPGSPAGSPTSTEEGTSTEPSEGSAPGTSTEPSEPKKKRKVMDKKYSIGLAIGTNSVGWAVITDEYKVPSKKFKVLGNTDRHSIKKNLIGALLFDSGETAEATRLKRTARRRYTRRKNRICYLQEIFSNEMAKVDDSFFHRLEESFLVEEDKKHERHPIFGNIVDEVAYHEKYPTIYHLRKKLVDSTDKADLRLIYLALAHMIKFRGHFLIEGDLNPDNSDVDKLFIQLVQTYNQLFEENPINASGVDAKAILSARLSKSRRLENLIAQLPGEKKNGLFGNLIALSLGLTPNFKSNFDLAEDAKLQLSKDTYDDDLDNLLAQIGDQYADLFLAAKNLSDAILLSDILRVNTEITKAPLSASMIKRYDEHHQDLTLLKALVRQQLPEKYKEIFFDQSKNGYAGYIDGGASQEEFYKFIKPILEKMDGTEELLVKLNREDLLRKQRTFDNGSIPHQIHLGELHAILRRQEDFYPFLKDNREKIEKILTFRIPYYVGPLARGNSRFAWMTRKSEETITPWNFEEVVDKGASAQSFIERMTNFDKNLPNEKVLPKHSLLYEYFTVYNELTKVKYVTEGMRKPAFLSGEQKKAIVDLLFKTNRKVTVKQLKEDYFKKIECFDSVEISGVEDRFNASLGTYHDLLKIIKDKDFLDNEENEDILEDIVLTLTLFEDREMIEERLKTYAHLFDDKVMKQLKRRRYTGWGRLSRKLINGIRDKQSGKTILDFLKSDGFANRNFMQLIHDDSLTFKEDIQKAQVSGQGDSLHEHIANLAGSPAIKKGILQTVKVVDELVKVMGRHKPENIVIEMARENQTTQKGQKNSRERMKRIEEGIKELGSQILKEHPVENTQLQNEKLYLYYLQNGRDMYVDQELDINRLSDYDVDAIVPQSFLKDDSIDNKVLTRSDKNRGKSDNVPSEEVVKKMKNYWRQLLNAKLITQRKFDNLTKAERGGLSELDKAGFIKRQLVETRQITKHVAQILDSRMNTKYDENDKLIREVKVITLKSKLVSDFRKDFQFYKVREINNYHHAHDAYLNAVVGTALIKKYPKLESEFVYGDYKVYDVRKMIAKSEQEIGKATAKYFFYSNIMNFFKTEITLANGEIRKRPLIETNGETGEIVWDKGRDFATVRKVLSMPQVNIVKKTEVQTGGFSKESILPKRNSDKLIARKKDWDPKKYGGFDSPTVAYSVLVVAKVEKGKSKKLKSVKELLGITIMERSSFEKNPIDFLEAKGYKEVKKDLIIKLPKYSLFELENGRKRMLASAGELQKGNELALPSKYVNFLYLASHYEKLKGSPEDNEQKQLFVEQHKHYLDEIIEQISEFSKRVILADANLDKVLSAYNKHRDKPIREQAENIIHLFTLTNLGAPAAFKYFDTTIDRKRYTSTKEVLDATLIHQSITGLYETRIDLSQLGGDAYPYDVPDYASLGSGSPKKKRKVEDPKKKRKVDGSGSETPGTSESATPESRTLVTFKDVFVDFTREEWKLLDTAQQIVYRNVMLENYKNLVSLGYQLTKPDVILRLEKGEEPX

SEQ ID NO: 70 - protein, 2148 aa, synthetic construct
  REGION 1..2148: note = V19 fusion
  SITE 2148: note = misc_feature - Xaa =
MPAAKRVKLDGSNHDQEFDPPKVYPPVPAEKRKPIRVLSLFDGIATGLLVLKDLGIQVDRYIASEVCEDSITVGMVRHQGKIMYVGDVRSVTQKHIQEWGPFDLVIGGSPCNDLSIVNPARKGLYEGTGRLFFEFYRLLHDARPKEGDDRPFFWLFENVVAMGVSDKRDISRFLESNPVMIDAKEVSAAHRARYFWGNLPGMNRPLASTVNDKLELQECLEHGRIAKFSKVRTITTRSNSIKQGKDQHFPVFMNEKEDILWCTEMERVFGFPVHYTDVSNMSRLARQRLLGRSWSVPVIRHLFAPLKEYFACVSSGNSNANSRGPSFSSGLVPLSLRGSHMGPMEIYKTVSAWKRQPVRVLSLFRNIDKVLKSLGFLESGSGSGGGTLKYVEDVTNVVRRDVEKWGPFDLVYGSTQPLGSSCDRCPGWYMFQFHRILQYALPRQESQRPFFWIFMDNLLLTEDDQETTTRFLQTEAVTLQDVRGRDYQNAMRVWSNIPGLKSKHAPLTPKEEEYLQAQVRSRSKLDAPKVDLLVKNCLLPLREYFKYFSQNSLPLDGSGSETPGTSESATPESRTLVTFKDVFVDFTREEWKLLDTAQQIVYRNVMLENYKNLVSLGYQLTKPDVILRLEKGEEPGGPSSGAPPPSGGSPAGSPTSTEEGTSESATPESGPGTSTEPSEGSAPGSPAGSPTSTEEGTSTEPSEGSAPGTSTEPSEPKKKRKVMDKKYSIGLAIGTNSVGWAVITDEYKVPSKKFKVLGNTDRHSIKKNLIGALLFDSGETAEATRLKRTARRRYTRRKNRICYLQEIFSNEMAKVDDSFFHRLEESFLVEEDKKHERHPIFGNIVDEVAYHEKYPTIYHLRKKLVDSTDKADLRLIYLALAHMIKFRGHFLIEGDLNPDNSDVDKLFIQLVQTYNQLFEENPINASGVDAKAILSARLSKSRRLENLIAQLPGEKKNGLFGNLIALSLGLTPNFKSNFDLAEDAKLQLSKDTYDDDLDNLLAQIGDQYADLFLAAKNLSDAILLSDILRVNTEITKAPLSASMIKRYDEHHQDLTLLKALVRQQLPEKYKEIFFDQSKNGYAGYIDGGASQEEFYKFIKPILEKMDGTEELLVKLNREDLLRKQRTFDNGSIPHQIHLGELHAILRRQEDFYPFLKDNREKIEKILTFRIPYYVGPLARGNSRFAWMTRKSEETITPWNFEEVVDKGASAQSFIERMTNFDKNLPNEKVLPKHSLLYEYFTVYNELTKVKYVTEGMRKPAFLSGEQKKAIVDLLFKTNRKVTVKQLKEDYFKKIECFDSVEISGVEDRFNASLGTYHDLLKIIKDKDFLDNEENEDILEDIVLTLTLFEDREMIEERLKTYAHLFDDKVMKQLKRRRYTGWGRLSRKLINGIRDKQSGKTILDFLKSDGFANRNFMQLIHDDSLTFKEDIQKAQVSGQGDSLHEHIANLAGSPAIKKGILQTVKVVDELVKVMGRHKPENIVIEMARENQTTQKGQKNSRERMKRIEEGIKELGSQILKEHPVENTQLQNEKLYLYYLQNGRDMYVDQELDINRLSDYDVDAIVPQSFLKDDSIDNKVLTRSDKNRGKSDNVPSEEVVKKMKNYWRQLLNAKLITQRKFDNLTKAERGGLSELDKAGFIKRQLVETRQITKHVAQILDSRMNTKYDENDKLIREVKVITLKSKLVSDFRKDFQFYKVREINNYHHAHDAYLNAVVGTALIKKYPKLESEFVYGDYKVYDVRKMIAKSEQEIGKATAKYFFYSNIMNFFKTEITLANGEIRKRPLIETNGETGEIVWDKGRDFATVRKVLSMPQVNIVKKTEVQTGGFSKESILPKRNSDKLIARKKDWDPKKYGGFDSPTVAYSVLVVAKVEKGKSKKLKSVKELLGITIMERSSFEKNPIDFLEAKGYKEVKKDLIIKLPKYSLFELENGRKRMLASAGELQKGNELALPSKYVNFLYLASHYEKLKGSPEDNEQKQLFVEQHKHYLDEIIEQISEFSKRVILADANLDKVLSAYNKHRDKPIREQAENIIHLFTLTNLGAPAAFKYFDTTIDRKRYTSTKEVLDATLIHQSITGLYETRIDLSQLGGDAYPYDVPDYASLGSGSPKKKRKVEDPKKKRKVDGLEATNFSLLKQAGDVEENPGPMHX

SEQ ID NO: 71 - protein, 2163 aa, synthetic construct
  REGION 1..2163: note = V20 fusion
  SITE 2163: note = misc_feature - Xaa =
MNHDQEFDPPKVYPPVPAEKRKPIRVLSLFDGIATGLLVLKDLGIQVDRYIASEVCEDSITVGMVRHQGKIMYVGDVRSVTQKHIQEWGPFDLVIGGSPCNDLSIVNPARKGLYEGTGRLFFEFYRLLHDARPKEGDDRPFFWLFENVVAMGVSDKRDISRFLESNPVMIDAKEVSAAHRARYFWGNLPGMNRPLASTVNDKLELQECLEHGRIAKFSKVRTITTRSNSIKQGKDQHFPVFMNEKEDILWCTEMERVFGFPVHYTDVSNMSRLARQRLLGRSWSVPVIRHLFAPLKEYFACVSSGNSNANSRGPSFSSGLVPLSLRGSHMFETVPVWRRQPVRVLSLFEDIKKELTSLGFLESGSDPGQLKHVVDVTDTVRKDVEEWGPFDLVYGATPPLGHTCDRPPSWYLFQFHRLLQYARPKPGSPRPFFWMFVDNLVLNKEDLDVASRFLEMEPVTIPDVHGGSLQNAVRVWSNIPAIRSSRHWALVSEEELSLLAQNKQSSKLAAKWPTKLVKNCFLPLREYFKYFSDGSGSETPGTSESATPESMNNSQGRVTFEDVTVNFTQGEWQRLNPEQRNLYRDVMLENYSNLVSVGQGETTKPDVILRLEQGKEPWLEEEEVLGSGRAEKNGDIGGQIWKPKDVKESLGGPSSGAPPPSGGSPAGSPTSTEEGTSESATPESGPGTSTEPSEGSAPGSPAGSPTSTEEGTSTEPSEGSAPGTSTEPSEPKKKRKVMDKKYSIGLAIGTNSVGWAVITDEYKVPSKKFKVLGNTDRHSIKKNLIGALLFDSGETAEATRLKRTARRRYTRRKNRICYLQEIFSNEMAKVDDSFFHRLEESFLVEEDKKHERHPIFGNIVDEVAYHEKYPTIYHLRKKLVDSTDKADLRLIYLALAHMIKFRGHFLIEGDLNPDNSDVDKLFIQLVQTYNQLFEENPINASGVDAKAILSARLSKSRRLENLIAQLPGEKKNGLFGNLIALSLGLTPNFKSNFDLAEDAKLQLSKDTYDDDLDNLLAQIGDQYADLFLAAKNLSDAILLSDILRVNTEITKAPLSASMIKRYDEHHQDLTLLKALVRQQLPEKYKEIFFDQSKNGYAGYIDGGASQEEFYKFIKPILEKMDGTEELLVKLNREDLLRKQRTFDNGSIPHQIHLGELHAILRRQEDFYPFLKDNREKIEKILTFRIPYYVGPLARGNSRFAWMTRKSEETITPWNFEEVVDKGASAQSFIERMTNFDKNLPNEKVLPKHSLLYEYFTVYNELTKVKYVTEGMRKPAFLSGEQKKAIVDLLFKTNRKVTVKQLKEDYFKKIECFDSVEISGVEDRFNASLGTYHDLLKIIKDKDFLDNEENEDILEDIVLTLTLFEDREMIEERLKTYAHLFDDKVMKQLKRRRYTGWGRLSRKLINGIRDKQSGKTILDFLKSDGFANRNFMQLIHDDSLTFKEDIQKAQVSGQGDSLHEHIANLAGSPAIKKGILQTVKVVDELVKVMGRHKPENIVIEMARENQTTQKGQKNSRERMKRIEEGIKELGSQILKEHPVENTQLQNEKLYLYYLQNGRDMYVDQELDINRLSDYDVDAIVPQSFLKDDSIDNKVLTRSDKNRGKSDNVPSEEVVKKMKNYWRQLLNAKLITQRKFDNLTKAERGGLSELDKAGFIKRQLVETRQITKHVAQILDSRMNTKYDENDKLIREVKVITLKSKLVSDFRKDFQFYKVREINNYHHAHDAYLNAVVGTALIKKYPKLESEFVYGDYKVYDVRKMIAKSEQEIGKATAKYFFYSNIMNFFKTEITLANGEIRKRPLIETNGETGEIVWDKGRDFATVRKVLSMPQVNIVKKTEVQTGGFSKESILPKRNSDKLIARKKDWDPKKYGGFDSPTVAYSVLVVAKVEKGKSKKLKSVKELLGITIMERSSFEKNPIDFLEAKGYKEVKKDLIIKLPKYSLFELENGRKRMLASAGELQKGNELALPSKYVNFLYLASHYEKLKGSPEDNEQKQLFVEQHKHYLDEIIEQISEFSKRVILADANLDKVLSAYNKHRDKPIREQAENIIHLFTLTNLGAPAAFKYFDTTIDRKRYTSTKEVLDATLIHQSITGLYETRIDLSQLGGDAYPYDVPDYASLGSGSPKKKRKVEDPKKKRKVDGLEATNFSLLKQAGDVEENPGPMHX

SEQ ID NO: 72 - protein, 2161 aa, synthetic construct
  REGION 1..2161: note = V21 fusion
  SITE 2161: note = misc_feature - Xaa =
MNNSQGRVTFEDVTVNFTQGEWQRLNPEQRNLYRDVMLENYSNLVSVGQGETTKPDVILRLEQGKEPWLEEEEVLGSGRAEKNGDIGGQIWKPKDVKESLSGSETPGTSESATPESMNHDQEFDPPKVYPPVPAEKRKPIRVLSLFDGIATGLLVLKDLGIQVDRYIASEVCEDSITVGMVRHQGKIMYVGDVRSVTQKHIQEWGPFDLVIGGSPCNDLSIVNPARKGLYEGTGRLFFEFYRLLHDARPKEGDDRPFFWLFENVVAMGVSDKRDISRFLESNPVMIDAKEVSAAHRARYFWGNLPGMNRPLASTVNDKLELQECLEHGRIAKFSKVRTITTRSNSIKQGKDQHFPVFMNEKEDILWCTEMERVFGFPVHYTDVSNMSRLARQRLLGRSWSVPVIRHLFAPLKEYFACVSSGNSNANSRGPSFSSGLVPLSLRGSHMFETVPVWRRQPVRVLSLFEDIKKELTSLGFLESGSDPGQLKHVVDVTDTVRKDVEEWGPFDLVYGATPPLGHTCDRPPSWYLFQFHRLLQYARPKPGSPRPFFWMFVDNLVLNKEDLDVASRFLEMEPVTIPDVHGGSLQNAVRVWSNIPAIRSSRHWALVSEEELSLLAQNKQSSKLAAKWPTKLVKNCFLPLREYFKYFSGGPSSGAPPPSGGSPAGSPTSTEEGTSESATPESGPGTSTEPSEGSAPGSPAGSPTSTEEGTSTEPSEGSAPGTSTEPSEPKKKRKVMDKKYSIGLAIGTNSVGWAVITDEYKVPSKKFKVLGNTDRHSIKKNLIGALLFDSGETAEATRLKRTARRRYTRRKNRICYLQEIFSNEMAKVDDSFFHRLEESFLVEEDKKHERHPIFGNIVDEVAYHEKYPTIYHLRKKLVDSTDKADLRLIYLALAHMIKFRGHFLIEGDLNPDNSDVDKLFIQLVQTYNQLFEENPINASGVDAKAILSARLSKSRRLENLIAQLPGEKKNGLFGNLIALSLGLTPNFKSNFDLAEDAKLQLSKDTYDDDLDNLLAQIGDQYADLFLAAKNLSDAILLSDILRVNTEITKAPLSASMIKRYDEHHQDLTLLKALVRQQLPEKYKEIFFDQSKNGYAGYIDGGASQEEFYKFIKPILEKMDGTEELLVKLNREDLLRKQRTFDNGSIPHQIHLGELHAILRRQEDFYPFLKDNREKIEKILTFRIPYYVGPLARGNSRFAWMTRKSEETITPWNFEEVVDKGASAQSFIERMTNFDKNLPNEKVLPKHSLLYEYFTVYNELTKVKYVTEGMRKPAFLSGEQKKAIVDLLFKTNRKVTVKQLKEDYFKKIECFDSVEISGVEDRFNASLGTYHDLLKIIKDKDFLDNEENEDILEDIVLTLTLFEDREMIEERLKTYAHLFDDKVMKQLKRRRYTGWGRLSRKLINGIRDKQSGKTILDFLKSDGFANRNFMQLIHDDSLTFKEDIQKAQVSGQGDSLHEHIANLAGSPAIKKGILQTVKVVDELVKVMGRHKPENIVIEMARENQTTQKGQKNSRERMKRIEEGIKELGSQILKEHPVENTQLQNEKLYLYYLQNGRDMYVDQELDINRLSDYDVDAIVPQSFLKDDSIDNKVLTRSDKNRGKSDNVPSEEVVKKMKNYWRQLLNAKLITQRKFDNLTKAERGGLSELDKAGFIKRQLVETRQITKHVAQILDSRMNTKYDENDKLIREVKVITLKSKLVSDFRKDFQFYKVREINNYHHAHDAYLNAVVGTALIKKYPKLESEFVYGDYKVYDVRKMIAKSEQEIGKATAKYFFYSNIMNFFKTEITLANGEIRKRPLIETNGETGEIVWDKGRDFATVRKVLSMPQVNIVKKTEVQTGGFSKESILPKRNSDKLIARKKDWDPKKYGGFDSPTVAYSVLVVAKVEKGKSKKLKSVKELLGITIMERSSFEKNPIDFLEAKGYKEVKKDLIIKLPKYSLFELENGRKRMLASAGELQKGNELALPSKYVNFLYLASHYEKLKGSPEDNEQKQLFVEQHKHYLDEIIEQISEFSKRVILADANLDKVLSAYNKHRDKPIREQAENIIHLFTLTNLGAPAAFKYFDTTIDRKRYTSTKEVLDATLIHQSITGLYETRIDLSQLGGDAYPYDVPDYASLGSGSPKKKRKVEDPKKKRKVDGLEATNFSLLKQAGDVEENPGPMHX

SEQ ID NO: 73 - protein, 2136 aa, synthetic construct
  REGION 1..2136: note = V22 fusion
  SITE 2136: note = misc_feature - Xaa =
MRTLVTFKDVFVDFTREEWKLLDTAQQIVYRNVMLENYKNLVSLGYQLTKPDVILRLEKGEEPSGSETPGTSESATPESMNHDQEFDPPKVYPPVPAEKRKPIRVLSLFDGIATGLLVLKDLGIQVDRYIASEVCEDSITVGMVRHQGKIMYVGDVRSVTQKHIQEWGPFDLVIGGSPCNDLSIVNPARKGLYEGTGRLFFEFYRLLHDARPKEGDDRPFFWLFENVVAMGVSDKRDISRFLESNPVMIDAKEVSAAHRARYFWGNLPGMNRPLASTVNDKLELQECLEHGRIAKFSKVRTITTRSNSIKQGKDQHFPVFMNEKEDILWCTEMERVFGFPVHYTDVSNMSRLARQRLLGRSWSVPVIRHLFAPLKEYFACVSSGNSNANSRGPSFSSGLVPLSLRGSHMGPMEIYKTVSAWKRQPVRVLSLFRNIDKVLKSLGFLESGSGSGGGTLKYVEDVTNVVRRDVEKWGPFDLVYGSTQPLGSSCDRCPGWYMFQFHRILQYALPRQESQRPFFWIFMDNLLLTEDDQETTTRFLQTEAVTLQDVRGRDYQNAMRVWSNIPGLKSKHAPLTPKEEEYLQAQVRSRSKLDAPKVDLLVKNCLLPLREYFKYFSQNSLPLGGPSSGAPPPSGGSPAGSPTSTEEGTSESATPESGPGTSTEPSEGSAPGSPAGSPTSTEEGTSTEPSEGSAPGTSTEPSEPKKKRKVMDKKYSIGLAIGTNSVGWAVITDEYKVPSKKFKVLGNTDRHSIKKNLIGALLFDSGETAEATRLKRTARRRYTRRKNRICYLQEIFSNEMAKVDDSFFHRLEESFLVEEDKKHERHPIFGNIVDEVAYHEKYPTIYHLRKKLVDSTDKADLRLIYLALAHMIKFRGHFLIEGDLNPDNSDVDKLFIQLVQTYNQLFEENPINASGVDAKAILSARLSKSRRLENLIAQLPGEKKNGLFGNLIALSLGLTPNFKSNFDLAEDAKLQLSKDTYDDDLDNLLAQIGDQYADLFLAAKNLSDAILLSDILRVNTEITKAPLSASMIKRYDEHHQDLTLLKALVRQQLPEKYKEIFFDQSKNGYAGYIDGGASQEEFYKFIKPILEKMDGTEELLVKLNREDLLRKQRTFDNGSIPHQIHLGELHAILRRQEDFYPFLKDNREKIEKILTFRIPYYVGPLARGNSRFAWMTRKSEETITPWNFEEVVDKGASAQSFIERMTNFDKNLPNEKVLPKHSLLYEYFTVYNELTKVKYVTEGMRKPAFLSGEQKKAIVDLLFKTNRKVTVKQLKEDYFKKIECFDSVEISGVEDRFNASLGTYHDLLKIIKDKDFLDNEENEDILEDIVLTLTLFEDREMIEERLKTYAHLFDDKVMKQLKRRRYTGWGRLSRKLINGIRDKQSGKTILDFLKSDGFANRNFMQLIHDDSLTFKEDIQKAQVSGQGDSLHEHIANLAGSPAIKKGILQTVKVVDELVKVMGRHKPENIVIEMARENQTTQKGQKNSRERMKRIEEGIKELGSQILKEHPVENTQLQNEKLYLYYLQNGRDMYVDQELDINRLSDYDVDAIVPQSFLKDDSIDNKVLTRSDKNRGKSDNVPSEEVVKKMKNYWRQLLNAKLITQRKFDNLTKAERGGLSELDKAGFIKRQLVETRQITKHVAQILDSRMNTKYDENDKLIREVKVITLKSKLVSDFRKDFQFYKVREINNYHHAHDAYLNAVVGTALIKKYPKLESEFVYGDYKVYDVRKMIAKSEQEIGKATAKYFFYSNIMNFFKTEITLANGEIRKRPLIETNGETGEIVWDKGRDFATVRKVLSMPQVNIVKKTEVQTGGFSKESILPKRNSDKLIARKKDWDPKKYGGFDSPTVAYSVLVVAKVEKGKSKKLKSVKELLGITIMERSSFEKNPIDFLEAKGYKEVKKDLIIKLPKYSLFELENGRKRMLASAGELQKGNELALPSKYVNFLYLASHYEKLKGSPEDNEQKQLFVEQHKHYLDEIIEQISEFSKRVILADANLDKVLSAYNKHRDKPIREQAENIIHLFTLTNLGAPAAFKYFDTTIDRKRYTSTKEVLDATLIHQSITGLYETRIDLSQLGGDAYPYDVPDYASLGSGSPKKKRKVEDPKKKRKVDGLEATNFSLLKQAGDVEENPGPMHX

SEQ ID NO: 74 - protein, 2159 aa, synthetic construct
  REGION 1..2159: note = V23 fusion
  SITE 2159: note = misc_feature - Xaa =
MVPAAKRVKLDGSDKKYSIGLAIGTNSVGWAVITDEYKVPSKKFKVLGNTDRHSIKKNLIGALLFDSGETAEATRLKRTARRRYTRRKNRICYLQEIFSNEMAKVDDSFFHRLEESFLVEEDKKHERHPIFGNIVDEVAYHEKYPTIYHLRKKLVDSTDKADLRLIYLALAHMIKFRGHFLIEGDLNPDNSDVDKLFIQLVQTYNQLFEENPINASGVDAKAILSARLSKSRRLENLIAQLPGEKKNGLFGNLIALSLGLTPNFKSNFDLAEDAKLQLSKDTYDDDLDNLLAQIGDQYADLFLAAKNLSDAILLSDILRVNTEITKAPLSASMIKRYDEHHQDLTLLKALVRQQLPEKYKEIFFDQSKNGYAGYIDGGASQEEFYKFIKPILEKMDGTEELLVKLNREDLLRKQRTFDNGSIPHQIHLGELHAILRRQEDFYPFLKDNREKIEKILTFRIPYYVGPLARGNSRFAWMTRKSEETITPWNFEEVVDKGASAQSFIERMTNFDKNLPNEKVLPKHSLLYEYFTVYNELTKVKYVTEGMRKPAFLSGEQKKAIVDLLFKTNRKVTVKQLKEDYFKKIECFDSVEISGVEDRFNASLGTYHDLLKIIKDKDFLDNEENEDILEDIVLTLTLFEDREMIEERLKTYAHLFDDKVMKQLKRRRYTGWGRLSRKLINGIRDKQSGKTILDFLKSDGFANRNFMQLIHDDSLTFKEDIQKAQVSGQGDSLHEHIANLAGSPAIKKGILQTVKVVDELVKVMGRHKPENIVIEMARENQTTQKGQKNSRERMKRIEEGIKELGSQILKEHPVENTQLQNEKLYLYYLQNGRDMYVDQELDINRLSDYDVDAIVPQSFLKDDSIDNKVLTRSDKNRGKSDNVPSEEVVKKMKNYWRQLLNAKLITQRKFDNLTKAERGGLSELDKAGFIKRQLVETRQITKHVAQILDSRMNTKYDENDKLIREVKVITLKSKLVSDFRKDFQFYKVREINNYHHAHDAYLNAVVGTALIKKYPKLESEFVYGDYKVYDVRKMIAKSEQEIGKATAKYFFYSNIMNFFKTEITLANGEIRKRPLIETNGETGEIVWDKGRDFATVRKVLSMPQVNIVKKTEVQTGGFSKESILPKRNSDKLIARKKDWDPKKYGGFDSPTVAYSVLVVAKVEKGKSKKLKSVKELLGITIMERSSFEKNPIDFLEAKGYKEVKKDLIIKLPKYSLFELENGRKRMLASAGELQKGNELALPSKYVNFLYLASHYEKLKGSPEDNEQKQLFVEQHKHYLDEIIEQISEFSKRVILADANLDKVLSAYNKHRDKPIREQAENIIHLFTLTNLGAPAAFKYFDTTIDRKRYTSTKEVLDATLIHQSITGLYETRIDLSQLGGDAYPYDVPDYASLGSGSPKKKRKVEDPKKKRKVDGGGPSSGAPPPSGGSPAGSPTSTEEGTSESATPESGPGTSTEPSEGSAPGSPAGSPTSTEEGTSTEPSEGSAPGTSTEPSEMGPMEIYKTVSAWKRQPVRVLSLFRNIDKVLKSLGFLESGSGSGGGTLKYVEDVTNVVRRDVEKWGPFDLVYGSTQPLGSSCDRCPGWYMFQFHRILQYALPRQESQRPFFWIFMDNLLLTEDDQETTTRFLQTEAVTLQDVRGRDYQNAMRVWSNIPGLKSKHAPLTPKEEEYLQAQVRSRSKLDAPKVDLLVKNCLLPLREYFKYFSQNSLPLSSGNSNANSRGPSFSSGLVPLSLRGSHMNHDQEFDPPKVYPPVPAEKRKPIRVLSLFDGIATGLLVLKDLGIQVDRYIASEVCEDSITVGMVRHQGKIMYVGDVRSVTQKHIQEWGPFDLVIGGSPCNDLSIVNPARKGLYEGTGRLFFEFYRLLHDARPKEGDDRPFFWLFENVVAMGVSDKRDISRFLESNPVMIDAKEVSAAHRARYFWGNLPGMNRPLASTVNDKLELQECLEHGRIAKFSKVRTITTRSNSIKQGKDQHFPVFMNEKEDILWCTEMERVFGFPVHYTDVSNMSRLARQRLLGRSWSVPVIRHLFAPLKEYFACVDGSGSETPGTSESATPESMNNSQGRVTFEDVTVNFTQGEWQRLNPEQRNLYRDVMLENYSNLVSVGQGETTKPDVILRLEQGKEPWLEEEEVLGSGRAEKNGDIGGQIWKPKDVKESLLEX

SEQ ID NO: 75 - protein, 2119 aa, synthetic construct
  REGION 1..2119: note = V24 fusion
  SITE 2119: note = misc_feature - Xaa =
MVPAAKRVKLDGSDKKYSIGLAIGTNSVGWAVITDEYKVPSKKFKVLGNTDRHSIKKNLIGALLFDSGETAEATRLKRTARRRYTRRKNRICYLQEIFSNEMAKVDDSFFHRLEESFLVEEDKKHERHPIFGNIVDEVAYHEKYPTIYHLRKKLVDSTDKADLRLIYLALAHMIKFRGHFLIEGDLNPDNSDVDKLFIQLVQTYNQLFEENPINASGVDAKAILSARLSKSRRLENLIAQLPGEKKNGLFGNLIALSLGLTPNFKSNFDLAEDAKLQLSKDTYDDDLDNLLAQIGDQYADLFLAAKNLSDAILLSDILRVNTEITKAPLSASMIKRYDEHHQDLTLLKALVRQQLPEKYKEIFFDQSKNGYAGYIDGGASQEEFYKFIKPILEKMDGTEELLVKLNREDLLRKQRTFDNGSIPHQIHLGELHAILRRQEDFYPFLKDNREKIEKILTFRIPYYVGPLARGNSRFAWMTRKSEETITPWNFEEVVDKGASAQSFIERMTNFDKNLPNEKVLPKHSLLYEYFTVYNELTKVKYVTEGMRKPAFLSGEQKKAIVDLLFKTNRKVTVKQLKEDYFKKIECFDSVEISGVEDRFNASLGTYHDLLKIIKDKDFLDNEENEDILEDIVLTLTLFEDREMIEERLKTYAHLFDDKVMKQLKRRRYTGWGRLSRKLINGIRDKQSGKTILDFLKSDGFANRNFMQLIHDDSLTFKEDIQKAQVSGQGDSLHEHIANLAGSPAIKKGILQTVKVVDELVKVMGRHKPENIVIEMARENQTTQKGQKNSRERMKRIEEGIKELGSQILKEHPVENTQLQNEKLYLYYLQNGRDMYVDQELDINRLSDYDVDAIVPQSFLKDDSIDNKVLTRSDKNRGKSDNVPSEEVVKKMKNYWRQLLNAKLITQRKFDNLTKAERGGLSELDKAGFIKRQLVETRQITKHVAQILDSRMNTKYDENDKLIREVKVITLKSKLVSDFRKDFQFYKVREINNYHHAHDAYLNAVVGTALIKKYPKLESEFVYGDYKVYDVRKMIAKSEQEIGKATAKYFFYSNIMNFFKTEITLANGEIRKRPLIETNGETGEIVWDKGRDFATVRKVLSMPQVNIVKKTEVQTGGFSKESILPKRNSDKLIARKKDWDPKKYGGFDSPTVAYSVLVVAKVEKGKSKKLKSVKELLGITIMERSSFEKNPIDFLEAKGYKEVKKDLIIKLPKYSLFELENGRKRMLASAGELQKGNELALPSKYVNFLYLASHYEKLKGSPEDNEQKQLFVEQHKHYLDEIIEQISEFSKRVILADANLDKVLSAYNKHRDKPIREQAENIIHLFTLTNLGAPAAFKYFDTTIDRKRYTSTKEVLDATLIHQSITGLYETRIDLSQLGGDAYPYDVPDYASLGSGSPKKKRKVEDPKKKRKVDGGGPSSGAPPPSGGSPAGSPTSTEEGTSESATPESGPGTSTEPSEGSAPGSPAGSPTSTEEGTSTEPSEGSAPGTSTEPSEMNHDQEFDPPKVYPPVPAEKRKPIRVLSLFDGIATGLLVLKDLGIQVDRYIASEVCEDSITVGMVRHQGKIMYVGDVRSVTQKHIQEWGPFDLVIGGSPCNDLSIVNPARKGLYEGTGRLFFEFYRLLHDARPKEGDDRPFFWLFENVVAMGVSDKRDISRFLESNPVMIDAKEVSAAHRARYFWGNLPGMNRPLASTVNDKLELQECLEHGRIAKFSKVRTITTRSNSIKQGKDQHFPVFMNEKEDILWCTEMERVFGFPVHYTDVSNMSRLARQRLLGRSWSVPVIRHLFAPLKEYFACVSSGNSNANSRGPSFSSGLVPLSLRGSHMGPMEIYKTVSAWKRQPVRVLSLFRNIDKVLKSLGFLESGSGSGGGTLKYVEDVTNVVRRDVEKWGPFDLVYGSTQPLGSSCDRCPGWYMFQFHRILQYALPRQESQRPFFWIFMDNLLLTEDDQETTTRFLQTEAVTLQDVRGRDYQNAMRVWSNIPGLKSKHAPLTPKEEEYLQAQVRSRSKLDAPKVDLLVKNCLLPLREYFKYFSQNSLPLDGSGSETPGTSESATPESRTLVTFKDVFVDFTREEWKLLDTAQQIVYRNVMLENYKNLVSLGYQLTKPDVILRLEKGEEPX

SEQ ID NO: 76 - protein, 2119 aa, synthetic construct
  REGION 1..2119: note = V25 fusion
  SITE 2119: note = misc_feature - Xaa =
MVPAAKRVKLDGSDKKYSIGLAIGTNSVGWAVITDEYKVPSKKFKVLGNTDRHSIKKNLIGALLFDSGETAEATRLKRTARRRYTRRKNRICYLQEIFSNEMAKVDDSFFHRLEESFLVEEDKKHERHPIFGNIVDEVAYHEKYPTIYHLRKKLVDSTDKADLRLIYLALAHMIKFRGHFLIEGDLNPDNSDVDKLFIQLVQTYNQLFEENPINASGVDAKAILSARLSKSRRLENLIAQLPGEKKNGLFGNLIALSLGLTPNFKSNFDLAEDAKLQLSKDTYDDDLDNLLAQIGDQYADLFLAAKNLSDAILLSDILRVNTEITKAPLSASMIKRYDEHHQDLTLLKALVRQQLPEKYKEIFFDQSKNGYAGYIDGGASQEEFYKFIKPILEKMDGTEELLVKLNREDLLRKQRTFDNGSIPHQIHLGELHAILRRQEDFYPFLKDNREKIEKILTFRIPYYVGPLARGNSRFAWMTRKSEETITPWNFEEVVDKGASAQSFIERMTNFDKNLPNEKVLPKHSLLYEYFTVYNELTKVKYVTEGMRKPAFLSGEQKKAIVDLLFKTNRKVTVKQLKEDYFKKIECFDSVEISGVEDRFNASLGTYHDLLKIIKDKDFLDNEENEDILEDIVLTLTLFEDREMIEERLKTYAHLFDDKVMKQLKRRRYTGWGRLSRKLINGIRDKQSGKTILDFLKSDGFANRNFMQLIHDDSLTFKEDIQKAQVSGQGDSLHEHIANLAGSPAIKKGILQTVKVVDELVKVMGRHKPENIVIEMARENQTTQKGQKNSRERMKRIEEGIKELGSQILKEHPVENTQLQNEKLYLYYLQNGRDMYVDQELDINRLSDYDVDAIVPQSFLKDDSIDNKVLTRSDKNRGKSDNVPSEEVVKKMKNYWRQLLNAKLITQRKFDNLTKAERGGLSELDKAGFIKRQLVETRQITKHVAQILDSRMNTKYDENDKLIREVKVITLKSKLVSDFRKDFQFYKVREINNYHHAHDAYLNAVVGTALIKKYPKLESEFVYGDYKVYDVRKMIAKSEQEIGKATAKYFFYSNIMNFFKTEITLANGEIRKRPLIETNGETGEIVWDKGRDFATVRKVLSMPQVNIVKKTEVQTGGFSKESILPKRNSDKLIARKKDWDPKKYGGFDSPTVAYSVLVVAKVEKGKSKKLKSVKELLGITIMERSSFEKNPIDFLEAKGYKEVKKDLIIKLPKYSLFELENGRKRMLASAGELQKGNELALPSKYVNFLYLASHYEKLKGSPEDNEQKQLFVEQHKHYLDEIIEQISEFSKRVILADANLDKVLSAYNKHRDKPIREQAENIIHLFTLTNLGAPAAFKYFDTTIDRKRYTSTKEVLDATLIHQSITGLYETRIDLSQLGGDAYPYDVPDYASLGSGSPKKKRKVEDPKKKRKVDGGGPSSGAPPPSGGSPAGSPTSTEEGTSESATPESGPGTSTEPSEGSAPGSPAGSPTSTEEGTSTEPSEGSAPGTSTEPSEMGPMEIYKTVSAWKRQPVRVLSLFRNIDKVLKSLGFLESGSGSGGGTLKYVEDVTNVVRRDVEKWGPFDLVYGSTQPLGSSCDRCPGWYMFQFHRILQYALPRQESQRPFFWIFMDNLLLTEDDQETTTRFLQTEAVTLQDVRGRDYQNAMRVWSNIPGLKSKHAPLTPKEEEYLQAQVRSRSKLDAPKVDLLVKNCLLPLREYFKYFSQNSLPLSSGNSNANSRGPSFSSGLVPLSLRGSHMNHDQEFDPPKVYPPVPAEKRKPIRVLSLFDGIATGLLVLKDLGIQVDRYIASEVCEDSITVGMVRHQGKIMYVGDVRSVTQKHIQEWGPFDLVIGGSPCNDLSIVNPARKGLYEGTGRLFFEFYRLLHDARPKEGDDRPFFWLFENVVAMGVSDKRDISRFLESNPVMIDAKEVSAAHRARYFWGNLPGMNRPLASTVNDKLELQECLEHGRIAKFSKVRTITTRSNSIKQGKDQHFPVFMNEKEDILWCTEMERVFGFPVHYTDVSNMSRLARQRLLGRSWSVPVIRHLFAPLKEYFACVDGSGSETPGTSESATPESRTLVTFKDVFVDFTREEWKLLDTAQQIVYRNVMLENYKNLVSLGYQLTKPDVILRLEKGEEPX

SEQ ID NO: 77 - protein, 2193 aa, synthetic construct
  REGION 1..2193: note = V26 fusion
  SITE 2193: note = misc_feature - Xaa =
MVPAAKRVKLDGSDKKYSIGLAIGTNSVGWAVITDEYKVPSKKFKVLGNTDRHSIKKNLIGALLFDSGETAEATRLKRTARRRYTRRKNRICYLQEIFSNEMAKVDDSFFHRLEESFLVEEDKKHERHPIFGNIVDEVAYHEKYPTIYHLRKKLVDSTDKADLRLIYLALAHMIKFRGHFLIEGDLNPDNSDVDKLFIQLVQTYNQLFEENPINASGVDAKAILSARLSKSRRLENLIAQLPGEKKNGLFGNLIALSLGLTPNFKSNFDLAEDAKLQLSKDTYDDDLDNLLAQIGDQYADLFLAAKNLSDAILLSDILRVNTEITKAPLSASMIKRYDEHHQDLTLLKALVRQQLPEKYKEIFFDQSKNGYAGYIDGGASQEEFYKFIKPILEKMDGTEELLVKLNREDLLRKQRTFDNGSIPHQIHLGELHAILRRQEDFYPFLKDNREKIEKILTFRIPYYVGPLARGNSRFAWMTRKSEETITPWNFEEVVDKGASAQSFIERMTNFDKNLPNEKVLPKHSLLYEYFTVYNELTKVKYVTEGMRKPAFLSGEQKKAIVDLLFKTNRKVTVKQLKEDYFKKIECFDSVEISGVEDRFNASLGTYHDLLKIIKDKDFLDNEENEDILEDIVLTLTLFEDREMIEERLKTYAHLFDDKVMKQLKRRRYTGWGRLSRKLINGIRDKQSGKTILDFLKSDGFANRNFMQLIHDDSLTFKEDIQKAQVSGQGDSLHEHIANLAGSPAIKKGILQTVKVVDELVKVMGRHKPENIVIEMARENQTTQKGQKNSRERMKRIEEGIKELGSQILKEHPVENTQLQNEKLYLYYLQNGRDMYVDQELDINRLSDYDVDAIVPQSFLKDDSIDNKVLTRSDKNRGKSDNVPSEEVVKKMKNYWRQLLNAKLITQRKFDNLTKAERGGLSELDKAGFIKRQLVETRQITKHVAQILDSRMNTKYDENDKLIREVKVITLKSKLVSDFRKDFQFYKVREINNYHHAHDAYLNAVVGTALIKKYPKLESEFVYGDYKVYDVRKMIAKSEQEIGKATAKYFFYSNIMNFFKTEITLANGEIRKRPLIETNGETGEIVWDKGRDFATVRKVLSMPQVNIVKKTEVQTGGFSKESILPKRNSDKLIARKKDWDPKKYGGFDSPTVAYSVLVVAKVEKGKSKKLKSVKELLGITIMERSSFEKNPIDFLEAKGYKEVKKDLIIKLPKYSLFELENGRKRMLASAGELQKGNELALPSKYVNFLYLASHYEKLKGSPEDNEQKQLFVEQHKHYLDEIIEQISEFSKRVILADANLDKVLSAYNKHRDKPIREQAENIIHLFTLTNLGAPAAFKYFDTTIDRKRYTSTKEVLDATLIHQSITGLYETRIDLSQLGGDAYPYDVPDYASLGSGSPKKKRKVEDPKKKRKVDGGGPSSGAPPPSGGSPAGSPTSTEEGTSESATPESGPGTSTEPSEGSAPGSPAGSPTSTEEGTSTEPSEGSAPGTSTEPSERTLVTFKDVFVDFTREEWKLLDTAQQIVYRNVMLENYKNLVSLGYQLTKPDVILRLEKGEEPSGSETPGTSESATPESGPGSPAGSPTSTEEGTSESATPESGPGSEPATSGSETPGTSESATPESGPGTSTEPSEGSAPGTSTEPSESATPESMGPMEIYKTVSAWKRQPVRVLSLFRNIDKVLKSLGFLESGSGSGGGTLKYVEDVTNVVRRDVEKWGPFDLVYGSTQPLGSSCDRCPGWYMFQFHRILQYALPRQESQRPFFWIFMDNLLLTEDDQETTTRFLQTEAVTLQDVRGRDYQNAMRVWSNIPGLKSKHAPLTPKEEEYLQAQVRSRSKLDAPKVDLLVKNCLLPLREYFKYFSQNSLPLSSGNSNANSRGPSFSSGLVPLSLRGSHMNHDQEFDPPKVYPPVPAEKRKPIRVLSLFDGIATGLLVLKDLGIQVDRYIASEVCEDSITVGMVRHQGKIMYVGDVRSVTQKHIQEWGPFDLVIGGSPCNDLSIVNPARKGLYEGTGRLFFEFYRLLHDARPKEGDDRPFFWLFENVVAMGVSDKRDISRFLESNPVMIDAKEVSAAHRARYFWGNLPGMNRPLASTVNDKLELQECLEHGRIAKFSKVRTITTRSNSIKQGKDQHFPVFMNEKEDILWCTEMERVFGFPVHYTDVSNMSRLARQRLLGRSWSVPVIRHLFAPLKEYFACVX

SEQ ID NO: 78 - protein, 2193 aa, synthetic construct
  REGION 1..2193: note = V27 fusion
  SITE 2193: note = misc_feature - Xaa =
MVPAAKRVKLDGSDKKYSIGLAIGTNSVGWAVITDEYKVPSKKFKVLGNTDRHSIKKNLIGALLFDSGETAEATRLKRTARRRYTRRKNRICYLQEIFSNEMAKVDDSFFHRLEESFLVEEDKKHERHPIFGNIVDEVAYHEKYPTIYHLRKKLVDSTDKADLRLIYLALAHMIKFRGHFLIEGDLNPDNSDVDKLFIQLVQTYNQLFEENPINASGVDAKAILSARLSKSRRLENLIAQLPGEKKNGLFGNLIALSLGLTPNFKSNFDLAEDAKLQLSKDTYDDDLDNLLAQIGDQYADLFLAAKNLSDAILLSDILRVNTEITKAPLSASMIKRYDEHHQDLTLLKALVRQQLPEKYKEIFFDQSKNGYAGYIDGGASQEEFYKFIKPILEKMDGTEELLVKLNREDLLRKQRTFDNGSIPHQIHLGELHAILRRQEDFYPFLKDNREKIEKILTFRIPYYVGPLARGNSRFAWMTRKSEETITPWNFEEVVDKGASAQSFIERMTNFDKNLPNEKVLPKHSLLYEYFTVYNELTKVKYVTEGMRKPAFLSGEQKKAIVDLLFKTNRKVTVKQLKEDYFKKIECFDSVEISGVEDRFNASLGTYHDLLKIIKDKDFLDNEENEDILEDIVLTLTLFEDREMIEERLKTYAHLFDDKVMKQLKRRRYTGWGRLSRKLINGIRDKQSGKTILDFLKSDGFANRNFMQLIHDDSLTFKEDIQKAQVSGQGDSLHEHIANLAGSPAIKKGILQTVKVVDELVKVMGRHKPENIVIEMARENQTTQKGQKNSRERMKRIEEGIKELGSQILKEHPVENTQLQNEKLYLYYLQNGRDMYVDQELDINRLSDYDVDAIVPQSFLKDDSIDNKVLTRSDKNRGKSDNVPSEEVVKKMKNYWRQLLNAKLITQRKFDNLTKAERGGLSELDKAGFIKRQLVETRQITKHVAQILDSRMNTKYDENDKLIREVKVITLKSKLVSDFRKDFQFYKVREINNYHHAHDAYLNAVVGTALIKKYPKLESEFVYGDYKVYDVRKMIAKSEQEIGKATAKYFFYSNIMNFFKTEITLANGEIRKRPLIETNGETGEIVWDKGRDFATVRKVLSMPQVNIVKKTEVQTGGFSKESILPKRNSDKLIARKKDWDPKKYGGFDSPTVAYSVLVVAKVEKGKSKKLKSVKELLGITIMERSSFEKNPIDFLEAKGYKEVKKDLIIKLPKYSLFELENGRKRMLASAGELQKGNELALPSKYVNFLYLASHYEKLKGSPEDNEQKQLFVEQHKHYLDEIIEQISEFSKRVILADANLDKVLSAYNKHRDKPIREQAENIIHLFTLTNLGAPAAFKYFDTTIDRKRYTSTKEVLDATLIHQSITGLYETRIDLSQLGGDAYPYDVPDYASLGSGSPKKKRKVEDPKKKRKVDGGGPSSGAPPPSGGSPAGSPTSTEEGTSESATPESGPGTSTEPSEGSAPGSPAGSPTSTEEGTSTEPSEGSAPGTSTEPSERTLVTFKDVFVDFTREEWKLLDTAQQIVYRNVMLENYKNLVSLGYQLTKPDVILRLEKGEEPSGSETPGTSESATPESGPGSPAGSPTSTEEGTSESATPESGPGSEPATSGSETPGTSESATPESGPGTSTEPSEGSAPGTSTEPSESATPESMNHDQEFDPPKVYPPVPAEKRKPIRVLSLFDGIATGLLVLKDLGIQVDRYIASEVCEDSITVGMVRHQGKIMYVGDVRSVTQKHIQEWGPFDLVIGGSPCNDLSIVNPARKGLYEGTGRLFFEFYRLLHDARPKEGDDRPFFWLFENVVAMGVSDKRDISRFLESNPVMIDAKEVSAAHRARYFWGNLPGMNRPLASTVNDKLELQECLEHGRIAKFSKVRTITTRSNSIKQGKDQHFPVFMNEKEDILWCTEMERVFGFPVHYTDVSNMSRLARQRLLGRSWSVPVIRHLFAPLKEYFACVSSGNSNANSRGPSFSSGLVPLSLRGSHMGPMEIYKTVSAWKRQPVRVLSLFRNIDKVLKSLGFLESGSGSGGGTLKYVEDVTNVVRRDVEKWGPFDLVYGSTQPLGSSCDRCPGWYMFQFHRILQYALPRQESQRPFFWIFMDNLLLTEDDQETTTRFLQTEAVTLQDVRGRDYQNAMRVWSNIPGLKSKHAPLTPKEEEYLQAQVRSRSKLDAPKVDLLVKNCLLPLREYFKYFSQNSLPLX

SEQ ID NO: 79 - protein, 2211 aa, synthetic construct
  REGION 1..2211: note = V28 fusion
  SITE 2211: note = misc_feature - Xaa =
MPKKKRKVMDKKYSIGLAIGTNSVGWAVITDEYKVPSKKFKVLGNTDRHSIKKNLIGALLFDSGETAEATRLKRTARRRYTRRKNRICYLQEIFSNEMAKVDDSFFHRLEESFLVEEDKKHERHPIFGNIVDEVAYHEKYPTIYHLRKKLVDSTDKADLRLIYLALAHMIKFRGHFLIEGDLNPDNSDVDKLFIQLVQTYNQLFEENPINASGVDAKAILSARLSKSRRLENLIAQLPGEKKNGLFGNLIALSLGLTPNFKSNFDLAEDAKLQLSKDTYDDDLDNLLAQIGDQYADLFLAAKNLSDAILLSDILRVNTEITKAPLSASMIKRYDEHHQDLTLLKALVRQQLPEKYKEIFFDQSKNGYAGYIDGGASQEEFYKFIKPILEKMDGTEELLVKLNREDLLRKQRTFDNGSIPHQIHLGELHAILRRQEDFYPFLKDNREKIEKILTFRIPYYVGPLARGNSRFAWMTRKSEETITPWNFEEVVDKGASAQSFIERMTNFDKNLPNEKVLPKHSLLYEYFTVYNELTKVKYVTEGMRKPAFLSGEQKKAIVDLLFKTNRKVTVKQLKEDYFKKIECFDSVEISGVEDRFNASLGTYHDLLKIIKDKDFLDNEENEDILEDIVLTLTLFEDREMIEERLKTYAHLFDDKVMKQLKRRRYTGWGRLSRKLINGIRDKQSGKTILDFLKSDGFANRNFMQLIHDDSLTFKEDIQKAQVSGQGDSLHEHIANLAGSPAIKKGILQTVKVVDELVKVMGRHKPENIVIEMARENQTTQKGQKNSRERMKRIEEGIKELGSQILKEHPVENTQLQNEKLYLYYLQNGRDMYVDQELDINRLSDYDVDAIVPQSFLKDDSIDNKVLTRSDKNRGKSDNVPSEEVVKKMKNYWRQLLNAKLITQRKFDNLTKAERGGLSELDKAGFIKRQLVETRQITKHVAQILDSRMNTKYDENDKLIREVKVITLKSKLVSDFRKDFQFYKVREINNYHHAHDAYLNAVVGTALIKKYPKLESEFVYGDYKVYDVRKMIAKSEQEIGKATAKYFFYSNIMNFFKTEITLANGEIRKRPLIETNGETGEIVWDKGRDFATVRKVLSMPQVNIVKKTEVQTGGFSKESILPKRNSDKLIARKKDWDPKKYGGFDSPTVAYSVLVVAKVEKGKSKKLKSVKELLGITIMERSSFEKNPIDFLEAKGYKEVKKDLIIKLPKYSLFELENGRKRMLASAGELQKGNELALPSKYVNFLYLASHYEKLKGSPEDNEQKQLFVEQHKHYLDEIIEQISEFSKRVILADANLDKVLSAYNKHRDKPIREQAENIIHLFTLTNLGAPAAFKYFDTTIDRKRYTSTKEVLDATLIHQSITGLYETRIDLSQLGGDAYPYDVPDYASLGSGSPKKKRKVEDPKKKRKVDGGGPSSGAPPPSGGSPAGSPTSTEEGTSESATPESGPGTSTEPSEGSAPGSPAGSPTSTEEGTSTEPSEGSAPGTSTEPSERTLVTFKDVFVDFTREEWKLLDTAQQIVYRNVMLENYKNLVSLGYQLTKPDVILRLEKGEEPSGSETPGTSEGGPSSGAPPPSGGSPAGSPTSTEEGTSESATPESGPGTSTEPSEGSAPGSPAGSPTSTEEGTSTEPSEGSAPGTSTEPSESATPESMFETVPVWRRQPVRVLSLFEDIKKELTSLGFLESGSDPGQLKHVVDVTDTVRKDVEEWGPFDLVYGATPPLGHTCDRPPSWYLFQFHRLLQYARPKPGSPRPFFWMFVDNLVLNKEDLDVASRFLEMEPVTIPDVHGGSLQNAVRVWSNIPAIRSSRHWALVSEEELSLLAQNKQSSKLAAKWPTKLVKNCFLPLREYFKYFSTELTSSLSSGNSNANSRGPSFSSGLVPLSLRGSHMNHDQEFDPPKVYPPVPAEKRKPIRVLSLFDGIATGLLVLKDLGIQVDRYIASEVCEDSITVGMVRHQGKIMYVGDVRSVTQKHIQEWGPFDLVIGGSPCNDLSIVNPARKGLYEGTGRLFFEFYRLLHDARPKEGDDRPFFWLFENVVAMGVSDKRDISRFLESNPVMIDAKEVSAAHRARYFWGNLPGMNRPLASTVNDKLELQECLEHGRIAKFSKVRTITTRSNSIKQGKDQHFPVFMNEKEDILWCTEMERVFGFPVHYTDVSNMSRLARQRLLGRSWSVPVIRHLFAPLKEYFACVLEATNFSLLKQAGDVEENPGPMHX

SEQ ID NO: 80 - protein, 2213 aa, synthetic construct
  REGION 1..2213: note = V29 fusion
  SITE 2213: note = misc_feature - Xaa =
MPKKKRKVMDKKYSIGLAIGTNSVGWAVITDEYKVPSKKFKVLGNTDRHSIKKNLIGALLFDSGETAEATRLKRTARRRYTRRKNRICYLQEIFSNEMAKVDDSFFHRLEESFLVEEDKKHERHPIFGNIVDEVAYHEKYPTIYHLRKKLVDSTDKADLRLIYLALAHMIKFRGHFLIEGDLNPDNSDVDKLFIQLVQTYNQLFEENPINASGVDAKAILSARLSKSRRLENLIAQLPGEKKNGLFGNLIALSLGLTPNFKSNFDLAEDAKLQLSKDTYDDDLDNLLAQIGDQYADLFLAAKNLSDAILLSDILRVNTEITKAPLSASMIKRYDEHHQDLTLLKALVRQQLPEKYKEIFFDQSKNGYAGYIDGGASQEEFYKFIKPILEKMDGTEELLVKLNREDLLRKQRTFDNGSIPHQIHLGELHAILRRQEDFYPFLKDNREKIEKILTFRIPYYVGPLARGNSRFAWMTRKSEETITPWNFEEVVDKGASAQSFIERMTNFDKNLPNEKVLPKHSLLYEYFTVYNELTKVKYVTEGMRKPAFLSGEQKKAIVDLLFKTNRKVTVKQLKEDYFKKIECFDSVEISGVEDRFNASLGTYHDLLKIIKDKDFLDNEENEDILEDIVLTLTLFEDREMIEERLKTYAHLFDDKVMKQLKRRRYTGWGRLSRKLINGIRDKQSGKTILDFLKSDGFANRNFMQLIHDDSLTFKEDIQKAQVSGQGDSLHEHIANLAGSPAIKKGILQTVKVVDELVKVMGRHKPENIVIEMARENQTTQKGQKNSRERMKRIEEGIKELGSQILKEHPVENTQLQNEKLYLYYLQNGRDMYVDQELDINRLSDYDVDAIVPQSFLKDDSIDNKVLTRSDKNRGKSDNVPSEEVVKKMKNYWRQLLNAKLITQRKFDNLTKAERGGLSELDKAGFIKRQLVETRQITKHVAQILDSRMNTKYDENDKLIREVKVITLKSKLVSDFRKDFQFYKVREINNYHHAHDAYLNAVVGTALIKKYPKLESEFVYGDYKVYDVRKMIAKSEQEIGKATAKYFFYSNIMNFFKTEITLANGEIRKRPLIETNGETGEIVWDKGRDFATVRKVLSMPQVNIVKKTEVQTGGFSKESILPKRNSDKLIARKKDWDPKKYGGFDSPTVAYSVLVVAKVEKGKSKKLKSVKELLGITIMERSSFEKNPIDFLEAKGYKEVKKDLIIKLPKYSLFELENGRKRMLASAGELQKGNELALPSKYVNFLYLASHYEKLKGSPEDNEQKQLFVEQHKHYLDEIIEQISEFSKRVILADANLDKVLSAYNKHRDKPIREQAENIIHLFTLTNLGAPAAFKYFDTTIDRKRYTSTKEVLDATLIHQSITGLYETRIDLSQLGGDAYPYDVPDYASLGSGSPKKKRKVEDPKKKRKVDGGGPSSGAPPPSGGSPAGSPTSTEEGTSESATPESGPGTSTEPSEGSAPGSPAGSPTSTEEGTSTEPSEGSAPGTSTEPSERTLELFRDVAIVFSQEEWQWLAPAQRDLYRDVMLETYSNLVSLGLAVSKPDVISFLEQGKEPWMSGSETPGTSEGGPSSGAPPPSGGSPAGSPTSTEEGTSESATPESGPGTSTEPSEGSAPGSPAGSPTSTEEGTSTEPSEGSAPGTSTEPSESATPESMFETVPVWRRQPVRVLSLFEDIKKELTSLGFLESGSDPGQLKHVVDVTDTVRKDVEEWGPFDLVYGATPPLGHTCDRPPSWYLFQFHRLLQYARPKPGSPRPFFWMFVDNLVLNKEDLDVASRFLEMEPVTIPDVHGGSLQNAVRVWSNIPAIRSSRHWALVSEEELSLLAQNKQSSKLAAKWPTKLVKNCFLPLREYFKYFSTELTSSLSSGNSNANSRGPSFSSGLVPLSLRGSHMNHDQEFDPPKVYPPVPAEKRKPIRVLSLFDGIATGLLVLKDLGIQVDRYIASEVCEDSITVGMVRHQGKIMYVGDVRSVTQKHIQEWGPFDLVIGGSPCNDLSIVNPARKGLYEGTGRLFFEFYRLLHDARPKEGDDRPFFWLFENVVAMGVSDKRDISRFLESNPVMIDAKEVSAAHRARYFWGNLPGMNRPLASTVNDKLELQECLEHGRIAKFSKVRTITTRSNSIKQGKDQHFPVFMNEKEDILWCTEMERVFGFPVHYTDVSNMSRLARQRLLGRSWSVPVIRHLFAPLKEYFACVLEATNFSLLKQAGDVEENPGPMHX

SEQ ID NO: 81 - protein, 2213 aa, synthetic construct
  REGION 1..2213: note = V30 fusion
  SITE 2213: note = misc_feature - Xaa =
MPKKKRKVMDKKYSIGLAIGTNSVGWAVITDEYKVPSKKFKVLGNTDRHSIKKNLIGALLFDSGETAEATRLKRTARRRYTRRKNRICYLQEIFSNEMAKVDDSFFHRLEESFLVEEDKKHERHPIFGNIVDEVAYHEKYPTIYHLRKKLVDSTDKADLRLIYLALAHMIKFRGHFLIEGDLNPDNSDVDKLFIQLVQTYNQLFEENPINASGVDAKAILSARLSKSRRLENLIAQLPGEKKNGLFGNLIALSLGLTPNFKSNFDLAEDAKLQLSKDTYDDDLDNLLAQIGDQYADLFLAAKNLSDAILLSDILRVNTEITKAPLSASMIKRYDEHHQDLTLLKALVRQQLPEKYKEIFFDQSKNGYAGYIDGGASQEEFYKFIKPILEKMDGTEELLVKLNREDLLRKQRTFDNGSIPHQIHLGELHAILRRQEDFYPFLKDNREKIEKILTFRIPYYVGPLARGNSRFAWMTRKSEETITPWNFEEVVDKGASAQSFIERMTNFDKNLPNEKVLPKHSLLYEYFTVYNELTKVKYVTEGMRKPAFLSGEQKKAIVDLLFKTNRKVTVKQLKEDYFKKIECFDSVEISGVEDRFNASLGTYHDLLKIIKDKDFLDNEENEDILEDIVLTLTLFEDREMIEERLKTYAHLFDDKVMKQLKRRRYTGWGRLSRKLINGIRDKQSGKTILDFLKSDGFANRNFMQLIHDDSLTFKEDIQKAQVSGQGDSLHEHIANLAGSPAIKKGILQTVKVVDELVKVMGRHKPENIVIEMARENQTTQKGQKNSRERMKRIEEGIKELGSQILKEHPVENTQLQNEKLYLYYLQNGRDMYVDQELDINRLSDYDVDAIVPQSFLKDDSIDNKVLTRSDKNRGKSDNVPSEEVVKKMKNYWRQLLNAKLITQRKFDNLTKAERGGLSELDKAGFIKRQLVETRQITKHVAQILDSRMNTKYDENDKLIREVKVITLKSKLVSDFRKDFQFYKVREINNYHHAHDAYLNAVVGTALIKKYPKLESEFVYGDYKVYDVRKMIAKSEQEIGKATAKYFFYSNIMNFFKTEITLANGEIRKRPLIETNGETGEIVWDKGRDFATVRKVLSMPQVNIVKKTEVQTGGFSKESILPKRNSDKLIARKKDWDPKKYGGFDSPTVAYSVLVVAKVEKGKSKKLKSVKELLGITIMERSSFEKNPIDFLEAKGYKEVKKDLIIKLPKYSLFELENGRKRMLASAGELQKGNELALPSKYVNFLYLASHYEKLKGSPEDNEQKQLFVEQHKHYLDEIIEQISEFSKRVILADANLDKVLSAYNKHRDKPIREQAENIIHLFTLTNLGAPAAFKYFDTTIDRKRYTSTKEVLDATLIHQSITGLYETRIDLSQLGGDAYPYDVPDYASLGSGSPKKKRKVEDPKKKRKVDGGGPSSGAPPPSGGSPAGSPTSTEEGTSESATPESGPGTSTEPSEGSAPGSPAGSPTSTEEGTSTEPSEGSAPGTSTEPSERTLMAFEDVAVYFSQEEWGLLDTAQRALYRRVMLDNFALVASLGLSTSRPRVVIQLERGEEPWVSGSETPGTSEGGPSSGAPPPSGGSPAGSPTSTEEGTSESATPESGPGTSTEPSEGSAPGSPAGSPTSTEEGTSTEPSEGSAPGTSTEPSESATPESMFETVPVWRRQPVRVLSLFEDIKKELTSLGFLESGSDPGQLKHVVDVTDTVRKDVEEWGPFDLVYGATPPLGHTCDRPPSWYLFQFHRLLQYARPKPGSPRPFFWMFVDNLVLNKEDLDVASRFLEMEPVTIPDVHGGSLQNAVRVWSNIPAIRSSRHWALVSEEELSLLAQNKQSSKLAAKWPTKLVKNCFLPLREYFKYFSTELTSSLSSGNSNANSRGPSFSSGLVPLSLRGSHMNHDQEFDPPKVYPPVPAEKRKPIRVLSLFDGIATGLLVLKDLGIQVDRYIASEVCEDSITVGMVRHQGKIMYVGDVRSVTQKHIQEWGPFDLVIGGSPCNDLSIVNPARKGLYEGTGRLFFEFYRLLHDARPKEGDDRPFFWLFENVVAMGVSDKRDISRFLESNPVMIDAKEVSAAHRARYFWGNLPGMNRPLASTVNDKLELQECLEHGRIAKFSKVRTITTRSNSIKQGKDQHFPVFMNEKEDILWCTEMERVFGFPVHYTDVSNMSRLARQRLLGRSWSVPVIRHLFAPLKEYFACVLEATNFSLLKQAGDVEENPGPMHX

SEQ ID NO: 82 - protein, 2224 aa, synthetic construct
  REGION 1..2224: note = V31 fusion
  SITE 2224: note = misc_feature - Xaa =
MPKKKRKVMDKKYSIGLAIGTNSVGWAVITDEYKVPSKKFKVLGNTDRHSIKKNLIGALLFDSGETAEATRLKRTARRRYTRRKNRICYLQEIFSNEMAKVDDSFFHRLEESFLVEEDKKHERHPIFGNIVDEVAYHEKYPTIYHLRKKLVDSTDKADLRLIYLALAHMIKFRGHFLIEGDLNPDNSDVDKLFIQLVQTYNQLFEENPINASGVDAKAILSARLSKSRRLENLIAQLPGEKKNGLFGNLIALSLGLTPNFKSNFDLAEDAKLQLSKDTYDDDLDNLLAQIGDQYADLFLAAKNLSDAILLSDILRVNTEITKAPLSASMIKRYDEHHQDLTLLKALVRQQLPEKYKEIFFDQSKNGYAGYIDGGASQEEFYKFIKPILEKMDGTEELLVKLNREDLLRKQRTFDNGSIPHQIHLGELHAILRRQEDFYPFLKDNREKIEKILTFRIPYYVGPLARGNSRFAWMTRKSEETITPWNFEEVVDKGASAQSFIERMTNFDKNLPNEKVLPKHSLLYEYFTVYNELTKVKYVTEGMRKPAFLSGEQKKAIVDLLFKTNRKVTVKQLKEDYFKKIECFDSVEISGVEDRFNASLGTYHDLLKIIKDKDFLDNEENEDILEDIVLTLTLFEDREMIEERLKTYAHLFDDKVMKQLKRRRYTGWGRLSRKLINGIRDKQSGKTILDFLKSDGFANRNFMQLIHDDSLTFKEDIQKAQVSGQGDSLHEHIANLAGSPAIKKGILQTVKVVDELVKVMGRHKPENIVIEMARENQTTQKGQKNSRERMKRIEEGIKELGSQILKEHPVENTQLQNEKLYLYYLQNGRDMYVDQELDINRLSDYDVDAIVPQSFLKDDSIDNKVLTRSDKNRGKSDNVPSEEVVKKMKNYWRQLLNAKLITQRKFDNLTKAERGGLSELDKAGFIKRQLVETRQITKHVAQILDSRMNTKYDENDKLIREVKVITLKSKLVSDFRKDFQFYKVREINNYHHAHDAYLNAVVGTALIKKYPKLESEFVYGDYKVYDVRKMIAKSEQEIGKATAKYFFYSNIMNFFKTEITLANGEIRKRPLIETNGETGEIVWDKGRDFATVRKVLSMPQVNIVKKTEVQTGGFSKESILPKRNSDKLIARKKDWDPKKYGGFDSPTVAYSVLVVAKVEKGKSKKLKSVKELLGITIMERSSFEKNPIDFLEAKGYKEVKKDLIIKLPKYSLFELENGRKRMLASAGELQKGNELALPSKYVNFLYLASHYEKLKGSPEDNEQKQLFVEQHKHYLDEIIEQISEFSKRVILADANLDKVLSAYNKHRDKPIREQAENIIHLFTLTNLGAPAAFKYFDTTIDRKRYTSTKEVLDATLIHQSITGLYETRIDLSQLGGDAYPYDVPDYASLGSGSPKKKRKVEDPKKKRKVDGGGPSSGAPPPSGGSPAGSPTSTEEGTSESATPESGPGTSTEPSEGSAPGSPAGSPTSTEEGTSTEPSEGSAPGTSTEPSEGSGSETPGTSESATPESRTLVTFKDVFVDFTREEWKLLDTAQQIVYRNVMLENYKNLVSLGYQLTKPDVILRLEKGEEPSGSETPGTSESATPESGPGSPAGSPTSTEEGTSESATPESGPGSEPATSGSETPGTSESATPESGPGTSTEPSEGSAPGTSTEPSESATPESMFETVPVWRRQPVRVLSLFEDIKKELTSLGFLESGSDPGQLKHVVDVTDTVRKDVEEWGPFDLVYGATPPLGHTCDRPPSWYLFQFHRLLQYARPKPGSPRPFFWMFVDNLVLNKEDLDVASRFLEMEPVTIPDVHGGSLQNAVRVWSNIPAIRSSRHWALVSEEELSLLAQNKQSSKLAAKWPTKLVKNCFLPLREYFKYFSTELTSSLSSGNSNANSRGPSFSSGLVPLSLRGSHMNHDQEFDPPKVYPPVPAEKRKPIRVLSLFDGIATGLLVLKDLGIQVDRYIASEVCEDSITVGMVRHQGKIMYVGDVRSVTQKHIQEWGPFDLVIGGSPCNDLSIVNPARKGLYEGTGRLFFEFYRLLHDARPKEGDDRPFFWLFENVVAMGVSDKRDISRFLESNPVMIDAKEVSAAHRARYFWGNLPGMNRPLASTVNDKLELQECLEHGRIAKFSKVRTITTRSNSIKQGKDQHFPVFMNEKEDILWCTEMERVFGFPVHYTDVSNMSRLARQRLLGRSWSVPVIRHLFAPLKEYFACVLEATNFSLLKQAGDVEENPGPMHX

SEQ ID NO: 83 - protein, 2207 aa, synthetic construct
  REGION 1..2207: note = V32 fusion
  SITE 2207: note = misc_feature - Xaa =
MVPAAKRVKLDGSDKKYSIGLAIGTNSVGWAVITDEYKVPSKKFKVLGNTDRHSIKKNLIGALLFDSGETAEATRLKRTARRRYTRRKNRICYLQEIFSNEMAKVDDSFFHRLEESFLVEEDKKHERHPIFGNIVDEVAYHEKYPTIYHLRKKLVDSTDKADLRLIYLALAHMIKFRGHFLIEGDLNPDNSDVDKLFIQLVQTYNQLFEENPINASGVDAKAILSARLSKSRRLENLIAQLPGEKKNGLFGNLIALSLGLTPNFKSNFDLAEDAKLQLSKDTYDDDLDNLLAQIGDQYADLFLAAKNLSDAILLSDILRVNTEITKAPLSASMIKRYDEHHQDLTLLKALVRQQLPEKYKEIFFDQSKNGYAGYIDGGASQEEFYKFIKPILEKMDGTEELLVKLNREDLLRKQRTFDNGSIPHQIHLGELHAILRRQEDFYPFLKDNREKIEKILTFRIPYYVGPLARGNSRFAWMTRKSEETITPWNFEEVVDKGASAQSFIERMTNFDKNLPNEKVLPKHSLLYEYFTVYNELTKVKYVTEGMRKPAFLSGEQKKAIVDLLFKTNRKVTVKQLKEDYFKKIECFDSVEISGVEDRFNASLGTYHDLLKIIKDKDFLDNEENEDILEDIVLTLTLFEDREMIEERLKTYAHLFDDKVMKQLKRRRYTGWGRLSRKLINGIRDKQSGKTILDFLKSDGFANRNFMQLIHDDSLTFKEDIQKAQVSGQGDSLHEHIANLAGSPAIKKGILQTVKVVDELVKVMGRHKPENIVIEMARENQTTQKGQKNSRERMKRIEEGIKELGSQILKEHPVENTQLQNEKLYLYYLQNGRDMYVDQELDINRLSDYDVDAIVPQSFLKDDSIDNKVLTRSDKNRGKSDNVPSEEVVKKMKNYWRQLLNAKLITQRKFDNLTKAERGGLSELDKAGFIKRQLVETRQITKHVAQILDSRMNTKYDENDKLIREVKVITLKSKLVSDFRKDFQFYKVREINNYHHAHDAYLNAVVGTALIKKYPKLESEFVYGDYKVYDVRKMIAKSEQEIGKATAKYFFYSNIMNFFKTEITLANGEIRKRPLIETNGETGEIVWDKGRDFATVRKVLSMPQVNIVKKTEVQTGGFSKESILPKRNSDKLIARKKDWDPKKYGGFDSPTVAYSVLVVAKVEKGKSKKLKSVKELLGITIMERSSFEKNPIDFLEAKGYKEVKKDLIIKLPKYSLFELENGRKRMLASAGELQKGNELALPSKYVNFLYLASHYEKLKGSPEDNEQKQLFVEQHKHYLDEIIEQISEFSKRVILADANLDKVLSAYNKHRDKPIREQAENIIHLFTLTNLGAPAAFKYFDTTIDRKRYTSTKEVLDATLIHQSITGLYETRIDLSQLGGDAYPYDVPDYASLGSGSPKKKRKVEDPKKKRKVDGGGPSSGAPPPSGGSPAGSPTSTEEGTSESATPESGPGTSTEPSEGSAPGSPAGSPTSTEEGTSTEPSEGSAPGTSTEPSEGSGSETPGTSESATPESMFETVPVWRRQPVRVLSLFEDIKKELTSLGFLESGSDPGQLKHVVDVTDTVRKDVEEWGPFDLVYGATPPLGHTCDRPPSWYLFQFHRLLQYARPKPGSPRPFFWMFVDNLVLNKEDLDVASRFLEMEPVTIPDVHGGSLQNAVRVWSNIPAIRSSRHWALVSEEELSLLAQNKQSSKLAAKWPTKLVKNCFLPLREYFKYFSTELTSSLSSGNSNANSRGPSFSSGLVPLSLRGSHMNHDQEFDPPKVYPPVPAEKRKPIRVLSLFDGIATGLLVLKDLGIQVDRYIASEVCEDSITVGMVRHQGKIMYVGDVRSVTQKHIQEWGPFDLVIGGSPCNDLSIVNPARKGLYEGTGRLFFEFYRLLHDARPKEGDDRPFFWLFENVVAMGVSDKRDISRFLESNPVMIDAKEVSAAHRARYFWGNLPGMNRPLASTVNDKLELQECLEHGRIAKFSKVRTITTRSNSIKQGKDQHFPVFMNEKEDILWCTEMERVFGFPVHYTDVSNMSRLARQRLLGRSWSVPVIRHLFAPLKEYFACVSGSETPGTSESATPESGPGSPAGSPTSTEEGTSESATPESGPGSEPATSGSETPGTSESATPESGPGTSTEPSEGSAPGTSTEPSESATPESRTLVTFKDVFVDFTREEWKLLDTAQQIVYRNVMLENYKNLVSLGYQLTKPDVILRLEKGEEPLEX

SEQ ID NO: 84 - protein, 2222 aa, synthetic construct
  REGION 1..2222: note = V33 fusion
  SITE 2222: note = misc_feature - Xaa =
MPKKKRKVMDKKYSIGLAIGTNSVGWAVITDEYKVPSKKFKVLGNTDRHSIKKNLIGALLFDSGETAEATRLKRTARRRYTRRKNRICYLQEIFSNEMAKVDDSFFHRLEESFLVEEDKKHERHPIFGNIVDEVAYHEKYPTIYHLRKKLVDSTDKADLRLIYLALAHMIKFRGHFLIEGDLNPDNSDVDKLFIQLVQTYNQLFEENPINASGVDAKAILSARLSKSRRLENLIAQLPGEKKNGLFGNLIALSLGLTPNFKSNFDLAEDAKLQLSKDTYDDDLDNLLAQIGDQYADLFLAAKNLSDAILLSDILRVNTEITKAPLSASMIKRYDEHHQDLTLLKALVRQQLPEKYKEIFFDQSKNGYAGYIDGGASQEEFYKFIKPILEKMDGTEELLVKLNREDLLRKQRTFDNGSIPHQIHLGELHAILRRQEDFYPFLKDNREKIEKILTFRIPYYVGPLARGNSRFAWMTRKSEETITPWNFEEVVDKGASAQSFIERMTNFDKNLPNEKVLPKHSLLYEYFTVYNELTKVKYVTEGMRKPAFLSGEQKKAIVDLLFKTNRKVTVKQLKEDYFKKIECFDSVEISGVEDRFNASLGTYHDLLKIIKDKDFLDNEENEDILEDIVLTLTLFEDREMIEERLKTYAHLFDDKVMKQLKRRRYTGWGRLSRKLINGIRDKQSGKTILDFLKSDGFANRNFMQLIHDDSLTFKEDIQKAQVSGQGDSLHEHIANLAGSPAIKKGILQTVKVVDELVKVMGRHKPENIVIEMARENQTTQKGQKNSRERMKRIEEGIKELGSQILKEHPVENTQLQNEKLYLYYLQNGRDMYVDQELDINRLSDYDVDAIVPQSFLKDDSIDNKVLTRSDKNRGKSDNVPSEEVVKKMKNYWRQLLNAKLITQRKFDNLTKAERGGLSELDKAGFIKRQLVETRQITKHVAQILDSRMNTKYDENDKLIREVKVITLKSKLVSDFRKDFQFYKVREINNYHHAHDAYLNAVVGTALIKKYPKLESEFVYGDYKVYDVRKMIAKSEQEIGKATAKYFFYSNIMNFFKTEITLANGEIRKRPLIETNGETGEIVWDKGRDFATVRKVLSMPQVNIVKKTEVQTGGFSKESILPKRNSDKLIARKKDWDPKKYGGFDSPTVAYSVLVVAKVEKGKSKKLKSVKELLGITIMERSSFEKNPIDFLEAKGYKEVKKDLIIKLPKYSLFELENGRKRMLASAGELQKGNELALPSKYVNFLYLASHYEKLKGSPEDNEQKQLFVEQHKHYLDEIIEQISEFSKRVILADANLDKVLSAYNKHRDKPIREQAENIIHLFTLTNLGAPAAFKYFDTTIDRKRYTSTKEVLDATLIHQSITGLYETRIDLSQLGGDAYPYDVPDYASLGSGSPKKKRKVEDPKKKRKVDGGGPSSGAPPPSGGSPAGSPTSTEEGTSESATPESGPGTSTEPSEGSAPGSPAGSPTSTEEGTSTEPSEGSAPGTSTEPSEMNNSQGRVTFEDVTVNFTQGEWQRLNPEQRNLYRDVMLENYSNLVSVGQGETTKPDVILRLEQGKEPWLEEEEVLGSGRAEKNGDIGGQIWKPKDVKESLSGSETPGTSEGGPSSGAPPPSGGSPAGSPTSTEEGTSESATPESGPGTSTEPSEGSAPGSPAGSPTSTEEGTSTEPSEGSAPGTSTEPSESATPESGSNHDQEFDPPKVYPPVPAEKRKPIRVLSLFDGIATGLLVLKDLGIQVDRYIASEVCEDSITVGMVRHQGKIMYVGDVRSVTQKHIQEWGPFDLVIGGSPCNDLSIVNPARKGLYEGTGRLFFEFYRLLHDARPKEGDDRPFFWLFENVVAMGVSDKRDISRFLESNPVMIDAKEVSAAHRARYFWGNLPGMNRPLASTVNDKLELQECLEHGRIAKFSKVRTITTRSNSIKQGKDQHFPVFMNEKEDILWCTEMERVFGFPVHYTDVSNMSRLARQRLLGRSWSVPVIRHLFAPLKEYFACVSSGNSNANSRGPSFSSGLVPLSLRGSHMFETVPVWRRQPVRVLSLFEDIKKELTSLGFLESGSDPGQLKHVVDVTDTVRKDVEEWGPFDLVYGATPPLGHTCDRPPSWYLFQFHRLLQYARPKPGSPRPFFWMFVDNLVLNKEDLDVASRFLEMEPVTIPDVHGGSLQNAVRVWSNIPAIRSSRHWALVSEEELSLLAQNKQSSKLAAKWPTKLVKNCFLPLREYFKYFSMHX

SEQ ID NO: 85 - protein, 2426 aa, synthetic construct
  REGION 1..2426: note = V34 fusion
  SITE 2426: note = misc_feature - Xaa =
MPKKKRKVMDKKYSIGLAIGTNSVGWAVITDEYKVPSKKFKVLGNTDRHSIKKNLIGALLFDSGETAEATRLKRTARRRYTRRKNRICYLQEIFSNEMAKVDDSFFHRLEESFLVEEDKKHERHPIFGNIVDEVAYHEKYPTIYHLRKKLVDSTDKADLRLIYLALAHMIKFRGHFLIEGDLNPDNSDVDKLFIQLVQTYNQLFEENPINASGVDAKAILSARLSKSRRLENLIAQLPGEKKNGLFGNLIALSLGLTPNFKSNFDLAEDAKLQLSKDTYDDDLDNLLAQIGDQYADLFLAAKNLSDAILLSDILRVNTEITKAPLSASMIKRYDEHHQDLTLLKALVRQQLPEKYKEIFFDQSKNGYAGYIDGGASQEEFYKFIKPILEKMDGTEELLVKLNREDLLRKQRTFDNGSIPHQIHLGELHAILRRQEDFYPFLKDNREKIEKILTFRIPYYVGPLARGNSRFAWMTRKSEETITPWNFEEVVDKGASAQSFIERMTNFDKNLPNEKVLPKHSLLYEYFTVYNELTKVKYVTEGMRKPAFLSGEQKKAIVDLLFKTNRKVTVKQLKEDYFKKIECFDSVEISGVEDRFNASLGTYHDLLKIIKDKDFLDNEENEDILEDIVLTLTLFEDREMIEERLKTYAHLFDDKVMKQLKRRRYTGWGRLSRKLINGIRDKQSGKTILDFLKSDGFANRNFMQLIHDDSLTFKEDIQKAQVSGQGDSLHEHIANLAGSPAIKKGILQTVKVVDELVKVMGRHKPENIVIEMARENQTTQKGQKNSRERMKRIEEGIKELGSQILKEHPVENTQLQNEKLYLYYLQNGRDMYVDQELDINRLSDYDVDAIVPQSFLKDDSIDNKVLTRSDKNRGKSDNVPSEEVVKKMKNYWRQLLNAKLITQRKFDNLTKAERGGLSELDKAGFIKRQLVETRQITKHVAQILDSRMNTKYDENDKLIREVKVITLKSKLVSDFRKDFQFYKVREINNYHHAHDAYLNAVVGTALIKKYPKLESEFVYGDYKVYDVRKMIAKSEQEIGKATAKYFFYSNIMNFFKTEITLANGEIRKRPLIETNGETGEIVWDKGRDFATVRKVLSMPQVNIVKKTEVQTGGFSKESILPKRNSDKLIARKKDWDPKKYGGFDSPTVAYSVLVVAKVEKGKSKKLKSVKELLGITIMERSSFEKNPIDFLEAKGYKEVKKDLIIKLPKYSLFELENGRKRMLASAGELQKGNELALPSKYVNFLYLASHYEKLKGSPEDNEQKQLFVEQHKHYLDEIIEQISEFSKRVILADANLDKVLSAYNKHRDKPIREQAENIIHLFTLTNLGAPAAFKYFDTTIDRKRYTSTKEVLDATLIHQSITGLYETRIDLSQLGGDAYPYDVPDYASLGSGSPKKKRKVEDPKKKRKVDGGGPSSGAPPPSGGSPAGSPTSTEEGTSESATPESGPGTHVSELIKENMHMKLYMEGTVDNHHFKCTSEGEGKPYEGTQTMRIKVVEGGPLPFAFDILATSFLYGSKTFINHTQGIPDFFKQSFPEGFTWERVTTYEDGGVLTATQDTSLQDGCLIYNVKIRGVNFTSNGPVMQKKTLGWEAFTETLYPADGGLEGRNDMALKLVGGSHLIANIKTTYRSKKPAKNLKMPGVYYVDYRLERIKEANNETYVEQHEVAVARYCDLPSKLGHKLNGSAPGTSTEPSEMNNSQGRVTFEDVTVNFTQGEWQRLNPEQRNLYRDVMLENYSNLVSVGQGETTKPDVILRLEQGKEPWLEEEEVLGSGRAEKNGDIGGQIWKPKDVKESLSGSETPGTSEGGPSSGAPPPSGGSPAGSPTSTEEGTSESATPESGPGTSTEPSEGSAPGSPAGSPTSTEEGTSTEPSEGSAPGTSTEPSESATPESGSNHDQEFDPPKVYPPVPAEKRKPIRVLSLFDGIATGLLVLKDLGIQVDRYIASEVCEDSITVGMVRHQGKIMYVGDVRSVTQKHIQEWGPFDLVIGGSPCNDLSIVNPARKGLYEGTGRLFFEFYRLLHDARPKEGDDRPFFWLFENVVAMGVSDKRDISRFLESNPVMIDAKEVSAAHRARYFWGNLPGMNRPLASTVNDKLELQECLEHGRIAKFSKVRTITTRSNSIKQGKDQHFPVFMNEKEDILWCTEMERVFGFPVHYTDVSNMSRLARQRLLGRSWSVPVIRHLFAPLKEYFACVSSGNSNANSRGPSFSSGLVPLSLRGSHMFETVPVWRRQPVRVLSLFEDIKKELTSLGFLESGSDPGQLKHVVDVTDTVRKDVEEWGPFDLVYGATPPLGHTCDRPPSWYLFQFHRLLQYARPKPGSPRPFFWMFVDNLVLNKEDLDVASRFLEMEPVTIPDVHGGSLQNAVRVWSNIPAIRSSRHWALVSEEELSLLAQNKQSSKLAAKWPTKLVKNCFLPLREYFKYFSMHX

SEQ ID NO: 86 - protein, 2453 aa, synthetic construct
  REGION 1..2453: note = V35 fusion
  SITE 2453: note = misc_feature - Xaa =
MPKKKRKVMDKKYSIGLAIGTNSVGWAVITDEYKVPSKKFKVLGNTDRHSIKKNLIGALLFDSGETAEATRLKRTARRRYTRRKNRICYLQEIFSNEMAKVDDSFFHRLEESFLVEEDKKHERHPIFGNIVDEVAYHEKYPTIYHLRKKLVDSTDKADLRLIYLALAHMIKFRGHFLIEGDLNPDNSDVDKLFIQLVQTYNQLFEENPINASGVDAKAILSARLSKSRRLENLIAQLPGEKKNGLFGNLIALSLGLTPNFKSNFDLAEDAKLQLSKDTYDDDLDNLLAQIGDQYADLFLAAKNLSDAILLSDILRVNTEITKAPLSASMIKRYDEHHQDLTLLKALVRQQLPEKYKEIFFDQSKNGYAGYIDGGASQEEFYKFIKPILEKMDGTEELLVKLNREDLLRKQRTFDNGSIPHQIHLGELHAILRRQEDFYPFLKDNREKIEKILTFRIPYYVGPLARGNSRFAWMTRKSEETITPWNFEEVVDKGASAQSFIERMTNFDKNLPNEKVLPKHSLLYEYFTVYNELTKVKYVTEGMRKPAFLSGEQKKAIVDLLFKTNRKVTVKQLKEDYFKKIECFDSVEISGVEDRFNASLGTYHDLLKIIKDKDFLDNEENEDILEDIVLTLTLFEDREMIEERLKTYAHLFDDKVMKQLKRRRYTGWGRLSRKLINGIRDKQSGKTILDFLKSDGFANRNFMQLIHDDSLTFKEDIQKAQVSGQGDSLHEHIANLAGSPAIKKGILQTVKVVDELVKVMGRHKPENIVIEMARENQTTQKGQKNSRERMKRIEEGIKELGSQILKEHPVENTQLQNEKLYLYYLQNGRDMYVDQELDINRLSDYDVDAIVPQSFLKDDSIDNKVLTRSDKNRGKSDNVPSEEVVKKMKNYWRQLLNAKLITQRKFDNLTKAERGGLSELDKAGFIKRQLVETRQITKHVAQILDSRMNTKYDENDKLIREVKVITLKSKLVSDFRKDFQFYKVREINNYHHAHDAYLNAVVGTALIKKYPKLESEFVYGDYKVYDVRKMIAKSEQEIGKATAKYFFYSNIMNFFKTEITLANGEIRKRPLIETNGETGEIVWDKGRDFATVRKVLSMPQVNIVKKTEVQTGGFSKESILPKRNSDKLIARKKDWDPKKYGGFDSPTVAYSVLVVAKVEKGKSKKLKSVKELLGITIMERSSFEKNPIDFLEAKGYKEVKKDLIIKLPKYSLFELENGRKRMLASAGELQKGNELALPSKYVNFLYLASHYEKLKGSPEDNEQKQLFVEQHKHYLDEIIEQISEFSKRVILADANLDKVLSAYNKHRDKPIREQAENIIHLFTLTNLGAPAAFKYFDTTIDRKRYTSTKEVLDATLIHQSITGLYETRIDLSQLGGDAYPYDVPDYASLGSGSPKKKRKVEDPKKKRKVDGGGPSSGAPPPSGGSPAGSPTSTEEGTSESATPESGPGTHVSELIKENMHMKLYMEGTVDNHHFKCTSEGEGKPYEGTQTMRIKVVEGGPLPFAFDILATSFLYGSKTFINHTQGIPDFFKQSFPEGFTWERVTTYEDGGVLTATQDTSLQDGCLIYNVKIRGVNFTSNGPVMQKKTLGWEAFTETLYPADGGLEGRNDMALKLVGGSHLIANIKTTYRSKKPAKNLKMPGVYYVDYRLERIKEANNETYVEQHEVAVARYCDLPSKLGHKLNGSAPGTSTEPSEMNNSQGRVTFEDVTVNFTQGEWQRLNPEQRNLYRDVMLENYSNLVSVGQGETTKPDVILRLEQGKEPWLEEEEVLGSGRAEKNGDIGGQIWKPKDVKESLSGSETPGTSEGGPSSGAPPPSGGSPAGSPTSTEEGTSESATPESGPGTSTEPSEGSAPGSPAGSPTSTEEGTSTEPSEGSAPGTSTEPSESATPESMFETVPVWRRQPVRVLSLFEDIKKELTSLGFLESGSDPGQLKHVVDVTDTVRKDVEEWGPFDLVYGATPPLGHTCDRPPSWYLFQFHRLLQYARPKPGSPRPFFWMFVDNLVLNKEDLDVASRFLEMEPVTIPDVHGGSLQNAVRVWSNIPAIRSSRHWALVSEEELSLLAQNKQSSKLAAKWPTKLVKNCFLPLREYFKYFSTELTSSLSSGNSNANSRGPSFSSGLVPLSLRGSHMNHDQEFDPPKVYPPVPAEKRKPIRVLSLFDGIATGLLVLKDLGIQVDRYIASEVCEDSITVGMVRHQGKIMYVGDVRSVTQKHIQEWGPFDLVIGGSPCNDLSIVNPARKGLYEGTGRLFFEFYRLLHDARPKEGDDRPFFWLFENVVAMGVSDKRDISRFLESNPVMIDAKEVSAAHRARYFWGNLPGMNRPLASTVNDKLELQECLEHGRIAKFSKVRTITTRSNSIKQGKDQHFPVFMNEKEDILWCTEMERVFGFPVHYTDVSNMSRLARQRLLGRSWSVPVIRHLFAPLKEYFACVLEATNFSLLKQAGDVEENPGPMHX

SEQ ID NO: 87 - protein, 2417 aa, synthetic construct
  REGION 1..2417: note = V36 fusion
  SITE 2417: note = misc_feature - Xaa =
MPKKKRKVMDKKYSIGLAIGTNSVGWAVITDEYKVPSKKFKVLGNTDRHSIKKNLIGALLFDSGETAEATRLKRTARRRYTRRKNRICYLQEIFSNEMAKVDDSFFHRLEESFLVEEDKKHERHPIFGNIVDEVAYHEKYPTIYHLRKKLVDSTDKADLRLIYLALAHMIKFRGHFLIEGDLNPDNSDVDKLFIQLVQTYNQLFEENPINASGVDAKAILSARLSKSRRLENLIAQLPGEKKNGLFGNLIALSLGLTPNFKSNFDLAEDAKLQLSKDTYDDDLDNLLAQIGDQYADLFLAAKNLSDAILLSDILRVNTEITKAPLSASMIKRYDEHHQDLTLLKALVRQQLPEKYKEIFFDQSKNGYAGYIDGGASQEEFYKFIKPILEKMDGTEELLVKLNREDLLRKQRTFDNGSIPHQIHLGELHAILRRQEDFYPFLKDNREKIEKILTFRIPYYVGPLARGNSRFAWMTRKSEETITPWNFEEVVDKGASAQSFIERMTNFDKNLPNEKVLPKHSLLYEYFTVYNELTKVKYVTEGMRKPAFLSGEQKKAIVDLLFKTNRKVTVKQLKEDYFKKIECFDSVEISGVEDRFNASLGTYHDLLKIIKDKDFLDNEENEDILEDIVLTLTLFEDREMIEERLKTYAHLFDDKVMKQLKRRRYTGWGRLSRKLINGIRDKQSGKTILDFLKSDGFANRNFMQLIHDDSLTFKEDIQKAQVSGQGDSLHEHIANLAGSPAIKKGILQTVKVVDELVKVMGRHKPENIVIEMARENQTTQKGQKNSRERMKRIEEGIKELGSQILKEHPVENTQLQNEKLYLYYLQNGRDMYVDQELDINRLSDYDVDAIVPQSFLKDDSIDNKVLTRSDKNRGKSDNVPSEEVVKKMKNYWRQLLNAKLITQRKFDNLTKAERGGLSELDKAGFIKRQLVETRQITKHVAQILDSRMNTKYDENDKLIREVKVITLKSKLVSDFRKDFQFYKVREINNYHHAHDAYLNAVVGTALIKKYPKLESEFVYGDYKVYDVRKMIAKSEQEIGKATAKYFFYSNIMNFFKTEITLANGEIRKRPLIETNGETGEIVWDKGRDFATVRKVLSMPQVNIVKKTEVQTGGFSKESILPKRNSDKLIARKKDWDPKKYGGFDSPTVAYSVLVVAKVEKGKSKKLKSVKELLGITIMERSSFEKNPIDFLEAKGYKEVKKDLIIKLPKYSLFELENGRKRMLASAGELQKGNELALPSKYVNFLYLASHYEKLKGSPEDNEQKQLFVEQHKHYLDEIIEQISEFSKRVILADANLDKVLSAYNKHRDKPIREQAENIIHLFTLTNLGAPAAFKYFDTTIDRKRYTSTKEVLDATLIHQSITGLYETRIDLSQLGGDAYPYDVPDYASLGSGSPKKKRKVEDPKKKRKVDGGGPSSGAPPPSGGSPAGSPTSTEEGTSESATPESGPGTHVSELIKENMHMKLYMEGTVDNHHFKCTSEGEGKPYEGTQTMRIKVVEGGPLPFAFDILATSFLYGSKTFINHTQGIPDFFKQSFPEGFTWERVTTYEDGGVLTATQDTSLQDGCLIYNVKIRGVNFTSNGPVMQKKTLGWEAFTETLYPADGGLEGRNDMALKLVGGSHLIANIKTTYRSKKPAKNLKMPGVYYVDYRLERIKEANNETYVEQHEVAVARYCDLPSKLGHKLNGSAPGTSTEPSERTLELFRDVAIVFSQEEWQWLAPAQRDLYRDVMLETYSNLVSLGLAVSKPDVISFLEQGKEPWMSGSETPGTSEGGPSSGAPPPSGGSPAGSPTSTEEGTSESATPESGPGTSTEPSEGSAPGSPAGSPTSTEEGTSTEPSEGSAPGTSTEPSESATPESMFETVPVWRRQPVRVLSLFEDIKKELTSLGFLESGSDPGQLKHVVDVTDTVRKDVEEWGPFDLVYGATPPLGHTCDRPPSWYLFQFHRLLQYARPKPGSPRPFFWMFVDNLVLNKEDLDVASRFLEMEPVTIPDVHGGSLQNAVRVWSNIPAIRSSRHWALVSEEELSLLAQNKQSSKLAAKWPTKLVKNCFLPLREYFKYFSTELTSSLSSGNSNANSRGPSFSSGLVPLSLRGSHMNHDQEFDPPKVYPPVPAEKRKPIRVLSLFDGIATGLLVLKDLGIQVDRYIASEVCEDSITVGMVRHQGKIMYVGDVRSVTQKHIQEWGPFDLVIGGSPCNDLSIVNPARKGLYEGTGRLFFEFYRLLHDARPKEGDDRPFFWLFENVVAMGVSDKRDISRFLESNPVMIDAKEVSAAHRARYFWGNLPGMNRPLASTVNDKLELQECLEHGRIAKFSKVRTITTRSNSIKQGKDQHFPVFMNEKEDILWCTEMERVFGFPVHYTDVSNMSRLARQRLLGRSWSVPVIRHLFAPLKEYFACVLEATNFSLLKQAGDVEENPGPMHX

SEQ ID NO: 88 - protein, 2417 aa, synthetic construct
  REGION 1..2417: note = V37 fusion
  SITE 2417: note = misc_feature - Xaa =
MPKKKRKVMDKKYSIGLAIGTNSVGWAVITDEYKVPSKKFKVLGNTDRHSIKKNLIGALLFDSGETAEATRLKRTARRRYTRRKNRICYLQEIFSNEMAKVDDSFFHRLEESFLVEEDKKHERHPIFGNIVDEVAYHEKYPTIYHLRKKLVDSTDKADLRLIYLALAHMIKFRGHFLIEGDLNPDNSDVDKLFIQLVQTYNQLFEENPINASGVDAKAILSARLSKSRRLENLIAQLPGEKKNGLFGNLIALSLGLTPNFKSNFDLAEDAKLQLSKDTYDDDLDNLLAQIGDQYADLFLAAKNLSDAILLSDILRVNTEITKAPLSASMIKRYDEHHQDLTLLKALVRQQLPEKYKEIFFDQSKNGYAGYIDGGASQEEFYKFIKPILEKMDGTEELLVKLNREDLLRKQRTFDNGSIPHQIHLGELHAILRRQEDFYPFLKDNREKIEKILTFRIPYYVGPLARGNSRFAWMTRKSEETITPWNFEEVVDKGASAQSFIERMTNFDKNLPNEKVLPKHSLLYEYFTVYNELTKVKYVTEGMRKPAFLSGEQKKAIVDLLFKTNRKVTVKQLKEDYFKKIECFDSVEISGVEDRFNASLGTYHDLLKIIKDKDFLDNEENEDILEDIVLTLTLFEDREMIEERLKTYAHLFDDKVMKQLKRRRYTGWGRLSRKLINGIRDKQSGKTILDFLKSDGFANRNFMQLIHDDSLTFKEDIQKAQVSGQGDSLHEHIANLAGSPAIKKGILQTVKVVDELVKVMGRHKPENIVIEMARENQTTQKGQKNSRERMKRIEEGIKELGSQILKEHPVENTQLQNEKLYLYYLQNGRDMYVDQELDINRLSDYDVDAIVPQSFLKDDSIDNKVLTRSDKNRGKSDNVPSEEVVKKMKNYWRQLLNAKLITQRKFDNLTKAERGGLSELDKAGFIKRQLVETRQITKHVAQILDSRMNTKYDENDKLIREVKVITLKSKLVSDFRKDFQFYKVREINNYHHAHDAYLNAVVGTALIKKYPKLESEFVYGDYKVYDVRKMIAKSEQEIGKATAKYFFYSNIMNFFKTEITLANGEIRKRPLIETNGETGEIVWDKGRDFATVRKVLSMPQVNIVKKTEVQTGGFSKESILPKRNSDKLIARKKDWDPKKYGGFDSPTVAYSVLVVAKVEKGKSKKLKSVKELLGITIMERSSFEKNPIDFLEAKGYKEVKKDLIIKLPKYSLFELENGRKRMLASAGELQKGNELALPSKYVNFLYLASHYEKLKGSPEDNEQKQLFVEQHKHYLDEIIEQISEFSKRVILADANLDKVLSAYNKHRDKPIREQAENIIHLFTLTNLGAPAAFKYFDTTIDRKRYTSTKEVLDATLIHQSITGLYETRIDLSQLGGDAYPYDVPDYASLGSGSPKKKRKVEDPKKKRKVDGGGPSSGAPPPSGGSPAGSPTSTEEGTSESATPESGPGTHVSELIKENMHMKLYMEGTVDNHHFKCTSEGEGKPYEGTQTMRIKVVEGGPLPFAFDILATSFLYGSKTFINHTQGIPDFFKQSFPEGFTWERVTTYEDGGVLTATQDTSLQDGCLIYNVKIRGVNFTSNGPVMQKKTLGWEAFTETLYPADGGLEGRNDMALKLVGGSHLIANIKTTYRSKKPAKNLKMPGVYYVDYRLERIKEANNETYVEQHEVAVARYCDLPSKLGHKLNGSAPGTSTEPSERTLMAFEDVAVYFSQEEWGLLDTAQRALYRRVMLDNFALVASLGLSTSRPRVVIQLERGEEPWVSGSETPGTSEGGPSSGAPPPSGGSPAGSPTSTEEGTSESATPESGPGTSTEPSEGSAPGSPAGSPTSTEEGTSTEPSEGSAPGTSTEPSESATPESMFETVPVWRRQPVRVLSLFEDIKKELTSLGFLESGSDPGQLKHVVDVTDTVRKDVEEWGPFDLVYGATPPLGHTCDRPPSWYLFQFHRLLQYARPKPGSPRPFFWMFVDNLVLNKEDLDVASRFLEMEPVTIPDVHGGSLQNAVRVWSNIPAIRSSRHWALVSEEELSLLAQNKQSSKLAAKWPTKLVKNCFLPLREYFKYFSTELTSSLSSGNSNANSRGPSFSSGLVPLSLRGSHMNHDQEFDPPKVYPPVPAEKRKPIRVLSLFDGIATGLLVLKDLGIQVDRYIASEVCEDSITVGMVRHQGKIMYVGDVRSVTQKHIQEWGPFDLVIGGSPCNDLSIVNPARKGLYEGTGRLFFEFYRLLHDARPKEGDDRPFFWLFENVVAMGVSDKRDISRFLESNPVMIDAKEVSAAHRARYFWGNLPGMNRPLASTVNDKLELQECLEHGRIAKFSKVRTITTRSNSIKQGKDQHFPVFMNEKEDILWCTEMERVFGFPVHYTDVSNMSRLARQRLLGRSWSVPVIRHLFAPLKEYFACVLEATNFSLLKQAGDVEENPGPMHX

SEQ ID NO: 89 - protein, 2411 aa, synthetic construct
  REGION 1..2411: note = V38 fusion
  SITE 2411: note = misc_feature - Xaa =
MNNSQGRVTFEDVTVNFTQGEWQRLNPEQRNLYRDVMLENYSNLVSVGQGETTKPDVILRLEQGKEPWLEEEEVLGSGRAEKNGDIGGQIWKPKDVKESLSGSETPGTSESATPESHVSELIKENMHMKLYMEGTVDNHHFKCTSEGEGKPYEGTQTMRIKVVEGGPLPFAFDILATSFLYGSKTFINHTQGIPDFFKQSFPEGFTWERVTTYEDGGVLTATQDTSLQDGCLIYNVKIRGVNFTSNGPVMQKKTLGWEAFTETLYPADGGLEGRNDMALKLVGGSHLIANIKTTYRSKKPAKNLKMPGVYYVDYRLERIKEANNETYVEQHEVAVARYCDLPSKLGHKLNSGSETPGTSESATPESMNHDQEFDPPKVYPPVPAEKRKPIRVLSLFDGIATGLLVLKDLGIQVDRYIASEVCEDSITVGMVRHQGKIMYVGDVRSVTQKHIQEWGPFDLVIGGSPCNDLSIVNPARKGLYEGTGRLFFEFYRLLHDARPKEGDDRPFFWLFENVVAMGVSDKRDISRFLESNPVMIDAKEVSAAHRARYFWGNLPGMNRPLASTVNDKLELQECLEHGRIAKFSKVRTITTRSNSIKQGKDQHFPVFMNEKEDILWCTEMERVFGFPVHYTDVSNMSRLARQRLLGRSWSVPVIRHLFAPLKEYFACVSSGNSNANSRGPSFSSGLVPLSLRGSHMFETVPVWRRQPVRVLSLFEDIKKELTSLGFLESGSDPGQLKHVVDVTDTVRKDVEEWGPFDLVYGATPPLGHTCDRPPSWYLFQFHRLLQYARPKPGSPRPFFWMFVDNLVLNKEDLDVASRFLEMEPVTIPDVHGGSLQNAVRVWSNIPAIRSSRHWALVSEEELSLLAQNKQSSKLAAKWPTKLVKNCFLPLREYFKYFSGGPSSGAPPPSGGSPAGSPTSTEEGTSESATPESGPGTSTEPSEGSAPGSPAGSPTSTEEGTSTEPSEGSAPGTSTEPSEPKKKRKVMDKKYSIGLAIGTNSVGWAVITDEYKVPSKKFKVLGNTDRHSIKKNLIGALLFDSGETAEATRLKRTARRRYTRRKNRICYLQEIFSNEMAKVDDSFFHRLEESFLVEEDKKHERHPIFGNIVDEVAYHEKYPTIYHLRKKLVDSTDKADLRLIYLALAHMIKFRGHFLIEGDLNPDNSDVDKLFIQLVQTYNQLFEENPINASGVDAKAILSARLSKSRRLENLIAQLPGEKKNGLFGNLIALSLGLTPNFKSNFDLAEDAKLQLSKDTYDDDLDNLLAQIGDQYADLFLAAKNLSDAILLSDILRVNTEITKAPLSASMIKRYDEHHQDLTLLKALVRQQLPEKYKEIFFDQSKNGYAGYIDGGASQEEFYKFIKPILEKMDGTEELLVKLNREDLLRKQRTFDNGSIPHQIHLGELHAILRRQEDFYPFLKDNREKIEKILTFRIPYYVGPLARGNSRFAWMTRKSEETITPWNFEEVVDKGASAQSFIERMTNFDKNLPNEKVLPKHSLLYEYFTVYNELTKVKYVTEGMRKPAFLSGEQKKAIVDLLFKTNRKVTVKQLKEDYFKKIECFDSVEISGVEDRFNASLGTYHDLLKIIKDKDFLDNEENEDILEDIVLTLTLFEDREMIEERLKTYAHLFDDKVMKQLKRRRYTGWGRLSRKLINGIRDKQSGKTILDFLKSDGFANRNFMQLIHDDSLTFKEDIQKAQVSGQGDSLHEHIANLAGSPAIKKGILQTVKVVDELVKVMGRHKPENIVIEMARENQTTQKGQKNSRERMKRIEEGIKELGSQILKEHPVENTQLQNEKLYLYYLQNGRDMYVDQELDINRLSDYDVDAIVPQSFLKDDSIDNKVLTRSDKNRGKSDNVPSEEVVKKMKNYWRQLLNAKLITQRKFDNLTKAERGGLSELDKAGFIKRQLVETRQITKHVAQILDSRMNTKYDENDKLIREVKVITLKSKLVSDFRKDFQFYKVREINNYHHAHDAYLNAVVGTALIKKYPKLESEFVYGDYKVYDVRKMIAKSEQEIGKATAKYFFYSNIMNFFKTEITLANGEIRKRPLIETNGETGEIVWDKGRDFATVRKVLSMPQVNIVKKTEVQTGGFSKESILPKRNSDKLIARKKDWDPKKYGGFDSPTVAYSVLVVAKVEKGKSKKLKSVKELLGITIMERSSFEKNPIDFLEAKGYKEVKKDLIIKLPKYSLFELENGRKRMLASAGELQKGNELALPSKYVNFLYLASHYEKLKGSPEDNEQKQLFVEQHKHYLDEIIEQISEFSKRVILADANLDKVLSAYNKHRDKPIREQAENIIHLFTLTNLGAPAAFKYFDTTIDRKRYTSTKEVLDATLIHQSITGLYETRIDLSQLGGDAYPYDVPDYASLGSGSPKKKRKVEDPKKKRKVDGLEATNFSLLKQAGDVEENPGPMHX

SEQ ID NO: 90 - protein, 2190 aa, synthetic construct
  REGION 1..2190: note = V39 fusion
  SITE 2190: note = misc_feature - Xaa =
MVPAAKRVKLDGSNHDQEFDPPKVYPPVPAEKRKPIRVLSLFDGIATGLLVLKDLGIQVDRYIASEVCEDSITVGMVRHQGKIMYVGDVRSVTQKHIQEWGPFDLVIGGSPCNDLSIVNPARKGLYEGTGRLFFEFYRLLHDARPKEGDDRPFFWLFENVVAMGVSDKRDISRFLESNPVMIDAKEVSAAHRARYFWGNLPGMNRPLASTVNDKLELQECLEHGRIAKFSKVRTITTRSNSIKQGKDQHFPVFMNEKEDILWCTEMERVFGFPVHYTDVSNMSRLARQRLLGRSWSVPVIRHLFAPLKEYFACVSSGNSNANSRGPSFSSGLVPLSLRGSHMFETVPVWRRQPVRVLSLFEDIKKELTSLGFLESGSDPGQLKHVVDVTDTVRKDVEEWGPFDLVYGATPPLGHTCDRPPSWYLFQFHRLLQYARPKPGSPRPFFWMFVDNLVLNKEDLDVASRFLEMEPVTIPDVHGGSLQNAVRVWSNIPAIRSSRHWALVSEEELSLLAQNKQSSKLAAKWPTKLVKNCFLPLREYFKYFSGGPSSGAPPPSGGSPAGSPTSTEEGTSESATPESGPGTSTEPSEGSAPGSPAGSPTSTEEGTSTEPSEGSAPGTSTEPSEMNNSQGRVTFEDVTVNFTQGEWQRLNPEQRNLYRDVMLENYSNLVSVGQGETTKPDVILRLEQGKEPWLEEEEVLGSGRAEKNGDIGGQIWKPKDVKESLSGSETPGTSEGGPGTSTEPSEGSAPGSPAGSPTSTEEGTSTEPSEGSAPGTSTEPSEPKKKRKVGSDKKYSIGLAIGTNSVGWAVITDEYKVPSKKFKVLGNTDRHSIKKNLIGALLFDSGETAEATRLKRTARRRYTRRKNRICYLQEIFSNEMAKVDDSFFHRLEESFLVEEDKKHERHPIFGNIVDEVAYHEKYPTIYHLRKKLVDSTDKADLRLIYLALAHMIKFRGHFLIEGDLNPDNSDVDKLFIQLVQTYNQLFEENPINASGVDAKAILSARLSKSRRLENLIAQLPGEKKNGLFGNLIALSLGLTPNFKSNFDLAEDAKLQLSKDTYDDDLDNLLAQIGDQYADLFLAAKNLSDAILLSDILRVNTEITKAPLSASMIKRYDEHHQDLTLLKALVRQQLPEKYKEIFFDQSKNGYAGYIDGGASQEEFYKFIKPILEKMDGTEELLVKLNREDLLRKQRTFDNGSIPHQIHLGELHAILRRQEDFYPFLKDNREKIEKILTFRIPYYVGPLARGNSRFAWMTRKSEETITPWNFEEVVDKGASAQSFIERMTNFDKNLPNEKVLPKHSLLYEYFTVYNELTKVKYVTEGMRKPAFLSGEQKKAIVDLLFKTNRKVTVKQLKEDYFKKIECFDSVEISGVEDRFNASLGTYHDLLKIIKDKDFLDNEENEDILEDIVLTLTLFEDREMIEERLKTYAHLFDDKVMKQLKRRRYTGWGRLSRKLINGIRDKQSGKTILDFLKSDGFANRNFMQLIHDDSLTFKEDIQKAQVSGQGDSLHEHIANLAGSPAIKKGILQTVKVVDELVKVMGRHKPENIVIEMARENQTTQKGQKNSRERMKRIEEGIKELGSQILKEHPVENTQLQNEKLYLYYLQNGRDMYVDQELDINRLSDYDVDAIVPQSFLKDDSIDNKVLTRSDKNRGKSDNVPSEEVVKKMKNYWRQLLNAKLITQRKFDNLTKAERGGLSELDKAGFIKRQLVETRQITKHVAQILDSRMNTKYDENDKLIREVKVITLKSKLVSDFRKDFQFYKVREINNYHHAHDAYLNAVVGTALIKKYPKLESEFVYGDYKVYDVRKMIAKSEQEIGKATAKYFFYSNIMNFFKTEITLANGEIRKRPLIETNGETGEIVWDKGRDFATVRKVLSMPQVNIVKKTEVQTGGFSKESILPKRNSDKLIARKKDWDPKKYGGFDSPTVAYSVLVVAKVEKGKSKKLKSVKELLGITIMERSSFEKNPIDFLEAKGYKEVKKDLIIKLPKYSLFELENGRKRMLASAGELQKGNELALPSKYVNFLYLASHYEKLKGSPEDNEQKQLFVEQHKHYLDEIIEQISEFSKRVILADANLDKVLSAYNKHRDKPIREQAENIIHLFTLTNLGAPAAFKYFDTTIDRKRYTSTKEVLDATLIHQSITGLYETRIDLSQLGGDAYPYDVPDYASLGSGSPKKKRKVEDPKKKRKVX

SEQ ID NO: 91 - protein, 2177 aa, synthetic construct
  REGION 1..2177: note = V40 fusion
  SITE 2177: note = misc_feature - Xaa =
MPAAKRVKLDGSNHDQEFDPPKVYPPVPAEKRKPIRVLSLFDGIATGLLVLKDLGIQVDRYIASEVCEDSITVGMVRHQGKIMYVGDVRSVTQKHIQEWGPFDLVIGGSPCNDLSIVNPARKGLYEGTGRLFFEFYRLLHDARPKEGDDRPFFWLFENVVAMGVSDKRDISRFLESNPVMIDAKEVSAAHRARYFWGNLPGMNRPLASTVNDKLELQECLEHGRIAKFSKVRTITTRSNSIKQGKDQHFPVFMNEKEDILWCTEMERVFGFPVHYTDVSNMSRLARQRLLGRSWSVPVIRHLFAPLKEYFACVSSGNSNANSRGPSFSSGLVPLSLRGSHMFETVPVWRRQPVRVLSLFEDIKKELTSLGFLESGSDPGQLKHVVDVTDTVRKDVEEWGPFDLVYGATPPLGHTCDRPPSWYLFQFHRLLQYARPKPGSPRPFFWMFVDNLVLNKEDLDVASRFLEMEPVTIPDVHGGSLQNAVRVWSNIPAIRSSRHWALVSEEELSLLAQNKQSSKLAAKWPTKLVKNCFLPLREYFKYFSGGPSSGAPPPSGGSPAGSPTSTEEGTSESATPESGPGTSTEPSEGSAPGSPAGSPTSTEEGTSTEPSEGSAPGTSTEPSERTLELFRDVAIVFSQEEWQWLAPAQRDLYRDVMLETYSNLVSLGLAVSKPDVISFLEQGKEPWMSGSETPGTSESGPGTSTEPSEGSAPGSPAGSPTSTEEGTSTEPSEGSAPGTSTEPSEPKKKRKVMDKKYSIGLAIGTNSVGWAVITDEYKVPSKKFKVLGNTDRHSIKKNLIGALLFDSGETAEATRLKRTARRRYTRRKNRICYLQEIFSNEMAKVDDSFFHRLEESFLVEEDKKHERHPIFGNIVDEVAYHEKYPTIYHLRKKLVDSTDKADLRLIYLALAHMIKFRGHFLIEGDLNPDNSDVDKLFIQLVQTYNQLFEENPINASGVDAKAILSARLSKSRRLENLIAQLPGEKKNGLFGNLIALSLGLTPNFKSNFDLAEDAKLQLSKDTYDDDLDNLLAQIGDQYADLFLAAKNLSDAILLSDILRVNTEITKAPLSASMIKRYDEHHQDLTLLKALVRQQLPEKYKEIFFDQSKNGYAGYIDGGASQEEFYKFIKPILEKMDGTEELLVKLNREDLLRKQRTFDNGSIPHQIHLGELHAILRRQEDFYPFLKDNREKIEKILTFRIPYYVGPLARGNSRFAWMTRKSEETITPWNFEEVVDKGASAQSFIERMTNFDKNLPNEKVLPKHSLLYEYFTVYNELTKVKYVTEGMRKPAFLSGEQKKAIVDLLFKTNRKVTVKQLKEDYFKKIECFDSVEISGVEDRFNASLGTYHDLLKIIKDKDFLDNEENEDILEDIVLTLTLFEDREMIEERLKTYAHLFDDKVMKQLKRRRYTGWGRLSRKLINGIRDKQSGKTILDFLKSDGFANRNFMQLIHDDSLTFKEDIQKAQVSGQGDSLHEHIANLAGSPAIKKGILQTVKVVDELVKVMGRHKPENIVIEMARENQTTQKGQKNSRERMKRIEEGIKELGSQILKEHPVENTQLQNEKLYLYYLQNGRDMYVDQELDINRLSDYDVDAIVPQSFLKDDSIDNKVLTRSDKNRGKSDNVPSEEVVKKMKNYWRQLLNAKLITQRKFDNLTKAERGGLSELDKAGFIKRQLVETRQITKHVAQILDSRMNTKYDENDKLIREVKVITLKSKLVSDFRKDFQFYKVREINNYHHAHDAYLNAVVGTALIKKYPKLESEFVYGDYKVYDVRKMIAKSEQEIGKATAKYFFYSNIMNFFKTEITLANGEIRKRPLIETNGETGEIVWDKGRDFATVRKVLSMPQVNIVKKTEVQTGGFSKESILPKRNSDKLIARKKDWDPKKYGGFDSPTVAYSVLVVAKVEKGKSKKLKSVKELLGITIMERSSFEKNPIDFLEAKGYKEVKKDLIIKLPKYSLFELENGRKRMLASAGELQKGNELALPSKYVNFLYLASHYEKLKGSPEDNEQKQLFVEQHKHYLDEIIEQISEFSKRVILADANLDKVLSAYNKHRDKPIREQAENIIHLFTLTNLGAPAAFKYFDTTIDRKRYTSTKEVLDATLIHQSITGLYETRIDLSQLGGDAYPYDVPDYASLGSGSPKKKRKVEDPKKKRKVDGLEATNFSLLKQAGDVEENPGPMHX

SEQ ID NO: 92 - protein, 2177 aa, synthetic construct
  REGION 1..2177: note = V41 fusion
  SITE 2177: note = misc_feature - Xaa =
MPAAKRVKLDGSNHDQEFDPPKVYPPVPAEKRKPIRVLSLFDGIATGLLVLKDLGIQVDRYIASEVCEDSITVGMVRHQGKIMYVGDVRSVTQKHIQEWGPFDLVIGGSPCNDLSIVNPARKGLYEGTGRLFFEFYRLLHDARPKEGDDRPFFWLFENVVAMGVSDKRDISRFLESNPVMIDAKEVSAAHRARYFWGNLPGMNRPLASTVNDKLELQECLEHGRIAKFSKVRTITTRSNSIKQGKDQHFPVFMNEKEDILWCTEMERVFGFPVHYTDVSNMSRLARQRLLGRSWSVPVIRHLFAPLKEYFACVSSGNSNANSRGPSFSSGLVPLSLRGSHMFETVPVWRRQPVRVLSLFEDIKKELTSLGFLESGSDPGQLKHVVDVTDTVRKDVEEWGPFDLVYGATPPLGHTCDRPPSWYLFQFHRLLQYARPKPGSPRPFFWMFVDNLVLNKEDLDVASRFLEMEPVTIPDVHGGSLQNAVRVWSNIPAIRSSRHWALVSEEELSLLAQNKQSSKLAAKWPTKLVKNCFLPLREYFKYFSGGPSSGAPPPSGGSPAGSPTSTEEGTSESATPESGPGTSTEPSEGSAPGSPAGSPTSTEEGTSTEPSEGSAPGTSTEPSERTLMAFEDVAVYFSQEEWGLLDTAQRALYRRVMLDNFALVASLGLSTSRPRVVIQLERGEEPWVSGSETPGTSEGGPGTSTEPSEGSAPGSPAGSPTSTEEGTSTEPSEGSAPGTSTEPSEPKKKRKVMDKKYSIGLAIGTNSVGWAVITDEYKVPSKKFKVLGNTDRHSIKKNLIGALLFDSGETAEATRLKRTARRRYTRRKNRICYLQEIFSNEMAKVDDSFFHRLEESFLVEEDKKHERHPIFGNIVDEVAYHEKYPTIYHLRKKLVDSTDKADLRLIYLALAHMIKFRGHFLIEGDLNPDNSDVDKLFIQLVQTYNQLFEENPINASGVDAKAILSARLSKSRRLENLIAQLPGEKKNGLFGNLIALSLGLTPNFKSNFDLAEDAKLQLSKDTYDDDLDNLLAQIGDQYADLFLAAKNLSDAILLSDILRVNTEITKAPLSASMIKRYDEHHQDLTLLKALVRQQLPEKYKEIFFDQSKNGYAGYIDGGASQEEFYKFIKPILEKMDGTEELLVKLNREDLLRKQRTFDNGSIPHQIHLGELHAILRRQEDFYPFLKDNREKIEKILTFRIPYYVGPLARGNSRFAWMTRKSEETITPWNFEEVVDKGASAQSFIERMTNFDKNLPNEKVLPKHSLLYEYFTVYNELTKVKYVTEGMRKPAFLSGEQKKAIVDLLFKTNRKVTVKQLKEDYFKKIECFDSVEISGVEDRFNASLGTYHDLLKIIKDKDFLDNEENEDILEDIVLTLTLFEDREMIEERLKTYAHLFDDKVMKQLKRRRYTGWGRLSRKLINGIRDKQSGKTILDFLKSDGFANRNFMQLIHDDSLTFKEDIQKAQVSGQGDSLHEHIANLAGSPAIKKGILQTVKVVDELVKVMGRHKPENIVIEMARENQTTQKGQKNSRERMKRIEEGIKELGSQILKEHPVENTQLQNEKLYLYYLQNGRDMYVDQELDINRLSDYDVDAIVPQSFLKDDSIDNKVLTRSDKNRGKSDNVPSEEVVKKMKNYWRQLLNAKLITQRKFDNLTKAERGGLSELDKAGFIKRQLVETRQITKHVAQILDSRMNTKYDENDKLIREVKVITLKSKLVSDFRKDFQFYKVREINNYHHAHDAYLNAVVGTALIKKYPKLESEFVYGDYKVYDVRKMIAKSEQEIGKATAKYFFYSNIMNFFKTEITLANGEIRKRPLIETNGETGEIVWDKGRDFATVRKVLSMPQVNIVKKTEVQTGGFSKESILPKRNSDKLIARKKDWDPKKYGGFDSPTVAYSVLVVAKVEKGKSKKLKSVKELLGITIMERSSFEKNPIDFLEAKGYKEVKKDLIIKLPKYSLFELENGRKRMLASAGELQKGNELALPSKYVNFLYLASHYEKLKGSPEDNEQKQLFVEQHKHYLDEIIEQISEFSKRVILADANLDKVLSAYNKHRDKPIREQAENIIHLFTLTNLGAPAAFKYFDTTIDRKRYTSTKEVLDATLIHQSITGLYETRIDLSQLGGDAYPYDVPDYASLGSGSPKKKRKVEDPKKKRKVDGLEATNFSLLKQAGDVEENPGPMHX

SEQ ID NO: 93 - protein, 2445 aa, synthetic construct
  REGION 1..2445: note = V42 fusion
  SITE 2445: note = misc_feature - Xaa =
MPAAKRVKLDGSNHDQEFDPPKVYPPVPAEKRKPIRVLSLFDGIATGLLVLKDLGIQVDRYIASEVCEDSITVGMVRHQGKIMYVGDVRSVTQKHIQEWGPFDLVIGGSPCNDLSIVNPARKGLYEGTGRLFFEFYRLLHDARPKEGDDRPFFWLFENVVAMGVSDKRDISRFLESNPVMIDAKEVSAAHRARYFWGNLPGMNRPLASTVNDKLELQECLEHGRIAKFSKVRTITTRSNSIKQGKDQHFPVFMNEKEDILWCTEMERVFGFPVHYTDVSNMSRLARQRLLGRSWSVPVIRHLFAPLKEYFACVSSGNSNANSRGPSFSSGLVPLSLRGSHMFETVPVWRRQPVRVLSLFEDIKKELTSLGFLESGSDPGQLKHVVDVTDTVRKDVEEWGPFDLVYGATPPLGHTCDRPPSWYLFQFHRLLQYARPKPGSPRPFFWMFVDNLVLNKEDLDVASRFLEMEPVTIPDVHGGSLQNAVRVWSNIPAIRSSRHWALVSEEELSLLAQNKQSSKLAAKWPTKLVKNCFLPLREYFKYFSGGPSSGSELIKENMHMKLYMEGTVDNHHFKCTSEGEGKPYEGTQTMRIKVVEGGPLPFAFDILATSFLYGSKTFINHTQGIPDFFKQSFPEGFTWERVTTYEDGGVLTATQDTSLQDGCLIYNVKIRGVNFTSNGPVMQKKTLGWEAFTETLYPADGGLEGRNDMALKLVGGSHLIANIKTTYRSKKPAKNLKMPGVYYVDYRLERIKEANNETYVEQHEVAVARYCDLPSKLGHKLNAPPPSGGSPAGSPTSTEEGTSESATPESGPGTSTEPSEGSAPGSPAGSPTSTEEGTSTEPSEGSAPGTSTEPSEMNNSQGRVTFEDVTVNFTQGEWQRLNPEQRNLYRDVMLENYSNLVSVGQGETTKPDVILRLEQGKEPWLEEEEVLGSGRAEKNGDIGGQIWKPKDVKESLSGSETPGTSEGGPGTSTEPSEGSAPGSPAGSPTSTEEGTSTEPSEGSAPGTSTEPSEPKKKRKVMDKKYSIGLAIGTNSVGWAVITDEYKVPSKKFKVLGNTDRHSIKKNLIGALLFDSGETAEATRLKRTARRRYTRRKNRICYLQEIFSNEMAKVDDSFFHRLEESFLVEEDKKHERHPIFGNIVDEVAYHEKYPTIYHLRKKLVDSTDKADLRLIYLALAHMIKFRGHFLIEGDLNPDNSDVDKLFIQLVQTYNQLFEENPINASGVDAKAILSARLSKSRRLENLIAQLPGEKKNGLFGNLIALSLGLTPNFKSNFDLAEDAKLQLSKDTYDDDLDNLLAQIGDQYADLFLAAKNLSDAILLSDILRVNTEITKAPLSASMIKRYDEHHQDLTLLKALVRQQLPEKYKEIFFDQSKNGYAGYIDGGASQEEFYKFIKPILEKMDGTEELLVKLNREDLLRKQRTFDNGSIPHQIHLGELHAILRRQEDFYPFLKDNREKIEKILTFRIPYYVGPLARGNSRFAWMTRKSEETITPWNFEEVVDKGASAQSFIERMTNFDKNLPNEKVLPKHSLLYEYFTVYNELTKVKYVTEGMRKPAFLSGEQKKAIVDLLFKTNRKVTVKQLKEDYFKKIECFDSVEISGVEDRFNASLGTYHDLLKIIKDKDFLDNEENEDILEDIVLTLTLFEDREMIEERLKTYAHLFDDKVMKQLKRRRYTGWGRLSRKLINGIRDKQSGKTILDFLKSDGFANRNFMQLIHDDSLTFKEDIQKAQVSGQGDSLHEHIANLAGSPAIKKGILQTVKVVDELVKVMGRHKPENIVIEMARENQTTQKGQKNSRERMKRIEEGIKELGSQILKEHPVENTQLQNEKLYLYYLQNGRDMYVDQELDINRLSDYDVDAIVPQSFLKDDSIDNKVLTRSDKNRGKSDNVPSEEVVKKMKNYWRQLLNAKLITQRKFDNLTKAERGGLSELDKAGFIKRQLVETRQITKHVAQILDSRMNTKYDENDKLIREVKVITLKSKLVSDFRKDFQFYKVREINNYHHAHDAYLNAVVGTALIKKYPKLESEFVYGDYKVYDVRKMIAKSEQEIGKATAKYFFYSNIMNFFKTEITLANGEIRKRPLIETNGETGEIVWDKGRDFATVRKVLSMPQVNIVKKTEVQTGGFSKESILPKRNSDKLIARKKDWDPKKYGGFDSPTVAYSVLVVAKVEKGKSKKLKSVKELLGITIMERSSFEKNPIDFLEAKGYKEVKKDLIIKLPKYSLFELENGRKRMLASAGELQKGNELALPSKYVNFLYLASHYEKLKGSPEDNEQKQLFVEQHKHYLDEIIEQISEFSKRVILADANLDKVLSAYNKHRDKPIREQAENIIHLFTLTNLGAPAAFKYFDTTIDRKRYTSTKEVLDATLIHQSITGLYETRIDLSQLGGDAYPYDVPDYASLGSGSPKKKRKVEDPKKKRKVDGLEATNFSLLKQAGDVEENPGPMHX

SEQ ID NO: 94 - protein, 2301 aa, synthetic construct
  REGION 1..2301: note = V43 fusion
  SITE 2301: note = misc_feature - Xaa =
MPAAKRVKLDGSNHDQEFDPPKVYPPVPAEKRKPIRVLSLFDGIATGLLVLKDLGIQVDRYIASEVCEDSITVGMVRHQGKIMYVGDVRSVTQKHIQEWGPFDLVIGGSPCNDLSIVNPARKGLYEGTGRLFFEFYRLLHDARPKEGDDRPFFWLFENVVAMGVSDKRDISRFLESNPVMIDAKEVSAAHRARYFWGNLPGMNRPLASTVNDKLELQECLEHGRIAKFSKVRTITTRSNSIKQGKDQHFPVFMNEKEDILWCTEMERVFGFPVHYTDVSNMSRLARQRLLGRSWSVPVIRHLFAPLKEYFACVSSGNSNANSRGPSFSSGLVPLSLRGSHMFETVPVWRRQPVRVLSLFEDIKKELTSLGFLESGSDPGQLKHVVDVTDTVRKDVEEWGPFDLVYGATPPLGHTCDRPPSWYLFQFHRLLQYARPKPGSPRPFFWMFVDNLVLNKEDLDVASRFLEMEPVTIPDVHGGSLQNAVRVWSNIPAIRSSRHWALVSEEELSLLAQNKQSSKLAAKWPTKLVKNCFLPLREYFKYFSGGPSSGSELIKENGLEGRNDMALKLVGGSHLIANIKTTYRSKKPAKNLKMPGVYYVDYRLERIKEANNETYVEQHEVAVARYCDLPSKLGHKLNAPPPSGGSPAGSPTSTEEGTSESATPESGPGTSTEPSEGSAPGSPAGSPTSTEEGTSTEPSEGSAPGTSTEPSEMNNSQGRVTFEDVTVNFTQGEWQRLNPEQRNLYRDVMLENYSNLVSVGQGETTKPDVILRLEQGKEPWLEEEEVLGSGRAEKNGDIGGQIWKPKDVKESLSGSETPGTSEGGPGTSTEPSEGSAPGSPAGSPTSTEEGTSTEPSEGSAPGTSTEPSEPKKKRKVMDKKYSIGLAIGTNSVGWAVITDEYKVPSKKFKVLGNTDRHSIKKNLIGALLFDSGETAEATRLKRTARRRYTRRKNRICYLQEIFSNEMAKVDDSFFHRLEESFLVEEDKKHERHPIFGNIVDEVAYHEKYPTIYHLRKKLVDSTDKADLRLIYLALAHMIKFRGHFLIEGDLNPDNSDVDKLFIQLVQTYNQLFEENPINASGVDAKAILSARLSKSRRLENLIAQLPGEKKNGLFGNLIALSLGLTPNFKSNFDLAEDAKLQLSKDTYDDDLDNLLAQIGDQYADLFLAAKNLSDAILLSDILRVNTEITKAPLSASMIKRYDEHHQDLTLLKALVRQQLPEKYKEIFFDQSKNGYAGYIDGGASQEEFYKFIKPILEKMDGTEELLVKLNREDLLRKQRTFDNGSIPHQIHLGELHAILRRQEDFYPFLKDNREKIEKILTFRIPYYVGPLARGNSRFAWMTRKSEETITPWNFEEVVDKGASAQSFIERMTNFDKNLPNEKVLPKHSLLYEYFTVYNELTKVKYVTEGMRKPAFLSGEQKKAIVDLLFKTNRKVTVKQLKEDYFKKIECFDSVEISGVEDRFNASLGTYHDLLKIIKDKDFLDNEENEDILEDIVLTLTLFEDREMIEERLKTYAHLFDDKVMKQLKRRRYTGWGRLSRKLINGIRDKQSGKTILDFLKSDGFANRNFMQLIHDDSLTFKEDIQKAQVSGQGDSLHEHIANLAGSPAIKKGILQTVKVVDELVKVMGRHKPENIVIEMARENQTTQKGQKNSRERMKRIEEGIKELGSQILKEHPVENTQLQNEKLYLYYLQNGRDMYVDQELDINRLSDYDVDAIVPQSFLKDDSIDNKVLTRSDKNRGKSDNVPSEEVVKKMKNYWRQLLNAKLITQRKFDNLTKAERGGLSELDKAGFIKRQLVETRQITKHVAQILDSRMNTKYDENDKLIREVKVITLKSKLVSDFRKDFQFYKVREINNYHHAHDAYLNAVVGTALIKKYPKLESEFVYGDYKVYDVRKMIAKSEQEIGKATAKYFFYSNIMNFFKTEITLANGEIRKRPLIETNGETGEIVWDKGRDFATVRKVLSMPQVNIVKKTEVQTGGFSKESILPKRNSDKLIARKKDWDPKKYGGFDSPTVAYSVLVVAKVEKGKSKKLKSVKELLGITIMERSSFEKNPIDFLEAKGYKEVKKDLIIKLPKYSLFELENGRKRMLASAGELQKGNELALPSKYVNFLYLASHYEKLKGSPEDNEQKQLFVEQHKHYLDEIIEQISEFSKRVILADANLDKVLSAYNKHRDKPIREQAENIIHLFTLTNLGAPAAFKYFDTTIDRKRYTSTKEVLDATLIHQSITGLYETRIDLSQLGGDAYPYDVPDYASLGSGSPKKKRKVEDPKKKRKVDGLEATNFSLLKQAGDVEENPGPMHX

SEQ ID NO: 95 - protein, 2261 aa, synthetic construct
  REGION 1..2261: note = V44 fusion
  SITE 2261: note = misc_feature - Xaa =
MPAAKRVKLDGSNHDQEFDPPKVYPPVPAEKRKPIRVLSLFDGIATGLLVLKDLGIQVDRYIASEVCEDSITVGMVRHQGKIMYVGDVRSVTQKHIQEWGPFDLVIGGSPCNDLSIVNPARKGLYEGTGRLFFEFYRLLHDARPKEGDDRPFFWLFENVVAMGVSDKRDISRFLESNPVMIDAKEVSAAHRARYFWGNLPGMNRPLASTVNDKLELQECLEHGRIAKFSKVRTITTRSNSIKQGKDQHFPVFMNEKEDILWCTEMERVFGFPVHYTDVSNMSRLARQRLLGRSWSVPVIRHLFAPLKEYFACVSSGNSNANSRGPSFSSGLVPLSLRGSHMFETVPVWRRQPVRVLSLFEDIKKELTSLGFLESGSDPGQLKHVVDVTDTVRKDVEEWGPFDLVYGATPPLGHTCDRPPSWYLFQFHRLLQYARPKPGSPRPFFWMFVDNLVLNKEDLDVASRFLEMEPVTIPDVHGGSLQNAVRVWSNIPAIRSSRHWALVSEEELSLLAQNKQSSKLAAKWPTKLVKNCFLPLREYFKYFSGGPSSGSELIKENYYVDYRLERIKEANNETYVEQHEVAVARYCDLPSKLGHKLNAPPPSGGSPAGSPTSTEEGTSESATPESGPGTSTEPSEGSAPGSPAGSPTSTEEGTSTEPSEGSAPGTSTEPSEMNNSQGRVTFEDVTVNFTQGEWQRLNPEQRNLYRDVMLENYSNLVSVGQGETTKPDVILRLEQGKEPWLEEEEVLGSGRAEKNGDIGGQIWKPKDVKESLSGSETPGTSEGGPGTSTEPSEGSAPGSPAGSPTSTEEGTSTEPSEGSAPGTSTEPSEPKKKRKVMDKKYSIGLAIGTNSVGWAVITDEYKVPSKKFKVLGNTDRHSIKKNLIGALLFDSGETAEATRLKRTARRRYTRRKNRICYLQEIFSNEMAKVDDSFFHRLEESFLVEEDKKHERHPIFGNIVDEVAYHEKYPTIYHLRKKLVDSTDKADLRLIYLALAHMIKFRGHFLIEGDLNPDNSDVDKLFIQLVQTYNQLFEENPINASGVDAKAILSARLSKSRRLENLIAQLPGEKKNGLFGNLIALSLGLTPNFKSNFDLAEDAKLQLSKDTYDDDLDNLLAQIGDQYADLFLAAKNLSDAILLSDILRVNTEITKAPLSASMIKRYDEHHQDLTLLKALVRQQLPEKYKEIFFDQSKNGYAGYIDGGASQEEFYKFIKPILEKMDGTEELLVKLNREDLLRKQRTFDNGSIPHQIHLGELHAILRRQEDFYPFLKDNREKIEKILTFRIPYYVGPLARGNSRFAWMTRKSEETITPWNFEEVVDKGASAQSFIERMTNFDKNLPNEKVLPKHSLLYEYFTVYNELTKVKYVTEGMRKPAFLSGEQKKAIVDLLFKTNRKVTVKQLKEDYFKKIECFDSVEISGVEDRFNASLGTYHDLLKIIKDKDFLDNEENEDILEDIVLTLTLFEDREMIEERLKTYAHLFDDKVMKQLKRRRYTGWGRLSRKLINGIRDKQSGKTILDFLKSDGFANRNFMQLIHDDSLTFKEDIQKAQVSGQGDSLHEHIANLAGSPAIKKGILQTVKVVDELVKVMGRHKPENIVIEMARENQTTQKGQKNSRERMKRIEEGIKELGSQILKEHPVENTQLQNEKLYLYYLQNGRDMYVDQELDINRLSDYDVDAIVPQSFLKDDSIDNKVLTRSDKNRGKSDNVPSEEVVKKMKNYWRQLLNAKLITQRKFDNLTKAERGGLSELDKAGFIKRQLVETRQITKHVAQILDSRMNTKYDENDKLIREVKVITLKSKLVSDFRKDFQFYKVREINNYHHAHDAYLNAVVGTALIKKYPKLESEFVYGDYKVYDVRKMIAKSEQEIGKATAKYFFYSNIMNFFKTEITLANGEIRKRPLIETNGETGEIVWDKGRDFATVRKVLSMPQVNIVKKTEVQTGGFSKESILPKRNSDKLIARKKDWDPKKYGGFDSPTVAYSVLVVAKVEKGKSKKLKSVKELLGITIMERSSFEKNPIDFLEAKGYKEVKKDLIIKLPKYSLFELENGRKRMLASAGELQKGNELALPSKYVNFLYLASHYEKLKGSPEDNEQKQLFVEQHKHYLDEIIEQISEFSKRVILADANLDKVLSAYNKHRDKPIREQAENIIHLFTLTNLGAPAAFKYFDTTIDRKRYTSTKEVLDATLIHQSITGLYETRIDLSQLGGDAYPYDVPDYASLGSGSPKKKRKVEDPKKKRKVDGLEATNFSLLKQAGDVEENPGPMHX

SEQ ID NO: 96 - protein, 2219 aa, synthetic construct
  REGION 1..2219: note = V45 fusion
  SITE 2219: note = misc_feature - Xaa =
MPAAKRVKLDGSNHDQEFDPPKVYPPVPAEKRKPIRVLSLFDGIATGLLVLKDLGIQVDRYIASEVCEDSITVGMVRHQGKIMYVGDVRSVTQKHIQEWGPFDLVIGGSPCNDLSIVNPARKGLYEGTGRLFFEFYRLLHDARPKEGDDRPFFWLFENVVAMGVSDKRDISRFLESNPVMIDAKEVSAAHRARYFWGNLPGMNRPLASTVNDKLELQECLEHGRIAKFSKVRTITTRSNSIKQGKDQHFPVFMNEKEDILWCTEMERVFGFPVHYTDVSNMSRLARQRLLGRSWSVPVIRHLFAPLKEYFACVSSGNSNANSRGPSFSSGLVPLSLRGSHMFETVPVWRRQPVRVLSLFEDIKKELTSLGFLESGSDPGQLKHVVDVTDTVRKDVEEWGPFDLVYGATPPLGHTCDRPPSWYLFQFHRLLQYARPKPGSPRPFFWMFVDNLVLNKEDLDVASRFLEMEPVTIPDVHGGSLQNAVRVWSNIPAIRSSRHWALVSEEELSLLAQNKQSSKLAAKWPTKLVKNCFLPLREYFKYFSGGPSSGAPPPSGGSPAGSPTSTEEGTSESATPESGPGTSTEPSEGSAPGSPAGSPTSTEEGTSTEPSEGSAPGTSTEPSEMNNSQGRVTFEDVTVNFTQGEWQRLNPEQRNLYRDVMLENYSNLVSVGQGETTKPDVILRLEQGKEPWLEEEEVLGSGRAEKNGDIGGQIWKPKDVKESLSGSGSGSGGSGSGGSGSGSGGSGSGGSGSGETPGTSEGGPGTSTEPSEGSAPGSPAGSPTSTEEGTSTEPSEGSAPGTSTEPSEPKKKRKVMDKKYSIGLAIGTNSVGWAVITDEYKVPSKKFKVLGNTDRHSIKKNLIGALLFDSGETAEATRLKRTARRRYTRRKNRICYLQEIFSNEMAKVDDSFFHRLEESFLVEEDKKHERHPIFGNIVDEVAYHEKYPTIYHLRKKLVDSTDKADLRLIYLALAHMIKFRGHFLIEGDLNPDNSDVDKLFIQLVQTYNQLFEENPINASGVDAKAILSARLSKSRRLENLIAQLPGEKKNGLFGNLIALSLGLTPNFKSNFDLAEDAKLQLSKDTYDDDLDNLLAQIGDQYADLFLAAKNLSDAILLSDILRVNTEITKAPLSASMIKRYDEHHQDLTLLKALVRQQLPEKYKEIFFDQSKNGYAGYIDGGASQEEFYKFIKPILEKMDGTEELLVKLNREDLLRKQRTFDNGSIPHQIHLGELHAILRRQEDFYPFLKDNREKIEKILTFRIPYYVGPLARGNSRFAWMTRKSEETITPWNFEEVVDKGASAQSFIERMTNFDKNLPNEKVLPKHSLLYEYFTVYNELTKVKYVTEGMRKPAFLSGEQKKAIVDLLFKTNRKVTVKQLKEDYFKKIECFDSVEISGVEDRFNASLGTYHDLLKIIKDKDFLDNEENEDILEDIVLTLTLFEDREMIEERLKTYAHLFDDKVMKQLKRRRYTGWGRLSRKLINGIRDKQSGKTILDFLKSDGFANRNFMQLIHDDSLTFKEDIQKAQVSGQGDSLHEHIANLAGSPAIKKGILQTVKVVDELVKVMGRHKPENIVIEMARENQTTQKGQKNSRERMKRIEEGIKELGSQILKEHPVENTQLQNEKLYLYYLQNGRDMYVDQELDINRLSDYDVDAIVPQSFLKDDSIDNKVLTRSDKNRGKSDNVPSEEVVKKMKNYWRQLLNAKLITQRKFDNLTKAERGGLSELDKAGFIKRQLVETRQITKHVAQILDSRMNTKYDENDKLIREVKVITLKSKLVSDFRKDFQFYKVREINNYHHAHDAYLNAVVGTALIKKYPKLESEFVYGDYKVYDVRKMIAKSEQEIGKATAKYFFYSNIMNFFKTEITLANGEIRKRPLIETNGETGEIVWDKGRDFATVRKVLSMPQVNIVKKTEVQTGGFSKESILPKRNSDKLIARKKDWDPKKYGGFDSPTVAYSVLVVAKVEKGKSKKLKSVKELLGITIMERSSFEKNPIDFLEAKGYKEVKKDLIIKLPKYSLFELENGRKRMLASAGELQKGNELALPSKYVNFLYLASHYEKLKGSPEDNEQKQLFVEQHKHYLDEIIEQISEFSKRVILADANLDKVLSAYNKHRDKPIREQAENIIHLFTLTNLGAPAAFKYFDTTIDRKRYTSTKEVLDATLIHQSITGLYETRIDLSQLGGDAYPYDVPDYASLGSGSPKKKRKVEDPKKKRKVDGLEX

SEQ ID NO: 97 - protein, 2241 aa, synthetic construct
  REGION 1..2241: note = V46 fusion
  SITE 2241: note = misc_feature - Xaa =
MVPAAKRVKLDGSNHDQEFDPPKVYPPVPAEKRKPIRVLSLFDGIATGLLVLKDLGIQVDRYIASEVCEDSITVGMVRHQGKIMYVGDVRSVTQKHIQEWGPFDLVIGGSPCNDLSIVNPARKGLYEGTGRLFFEFYRLLHDARPKEGDDRPFFWLFENVVAMGVSDKRDISRFLESNPVMIDAKEVSAAHRARYFWGNLPGMNRPLASTVNDKLELQECLEHGRIAKFSKVRTITTRSNSIKQGKDQHFPVFMNEKEDILWCTEMERVFGFPVHYTDVSNMSRLARQRLLGRSWSVPVIRHLFAPLKEYFACVSSGNSNANSRGPSFSSGLVPLSLRGSHMFETVPVWRRQPVRVLSLFEDIKKELTSLGFLESGSDPGQLKHVVDVTDTVRKDVEEWGPFDLVYGATPPLGHTCDRPPSWYLFQFHRLLQYARPKPGSPRPFFWMFVDNLVLNKEDLDVASRFLEMEPVTIPDVHGGSLQNAVRVWSNIPAIRSSRHWALVSEEELSLLAQNKQSSKLAAKWPTKLVKNCFLPLREYFKYFSGGPSSGAPPPSGGSPAGSPTSTEEGTSESATPESGPGTSTEPSEGSAPGSPAGSPTSTEEGTSTEPSEGSAPGTSTEPSEPKKKRKVGSGSETPGTSESATPESMNNSQGRVTFEDVTVNFTQGEWQRLNPEQRNLYRDVMLENYSNLVSVGQGETTKPDVILRLEQGKEPWLEEEEVLGSGRAEKNGDIGGQIWKPKDVKESLSGSGSGSGGSGSGGSGSGSGGSGSGGSGSGETPGTSEGGPGTSTEPSEGSAPGSPAGSPTSTEEGTSTEPSEGSAPGTSTEPSEPKKKRKVGSDKKYSIGLAIGTNSVGWAVITDEYKVPSKKFKVLGNTDRHSIKKNLIGALLFDSGETAEATRLKRTARRRYTRRKNRICYLQEIFSNEMAKVDDSFFHRLEESFLVEEDKKHERHPIFGNIVDEVAYHEKYPTIYHLRKKLVDSTDKADLRLIYLALAHMIKFRGHFLIEGDLNPDNSDVDKLFIQLVQTYNQLFEENPINASGVDAKAILSARLSKSRRLENLIAQLPGEKKNGLFGNLIALSLGLTPNFKSNFDLAEDAKLQLSKDTYDDDLDNLLAQIGDQYADLFLAAKNLSDAILLSDILRVNTEITKAPLSASMIKRYDEHHQDLTLLKALVRQQLPEKYKEIFFDQSKNGYAGYIDGGASQEEFYKFIKPILEKMDGTEELLVKLNREDLLRKQRTFDNGSIPHQIHLGELHAILRRQEDFYPFLKDNREKIEKILTFRIPYYVGPLARGNSRFAWMTRKSEETITPWNFEEVVDKGASAQSFIERMTNFDKNLPNEKVLPKHSLLYEYFTVYNELTKVKYVTEGMRKPAFLSGEQKKAIVDLLFKTNRKVTVKQLKEDYFKKIECFDSVEISGVEDRFNASLGTYHDLLKIIKDKDFLDNEENEDILEDIVLTLTLFEDREMIEERLKTYAHLFDDKVMKQLKRRRYTGWGRLSRKLINGIRDKQSGKTILDFLKSDGFANRNFMQLIHDDSLTFKEDIQKAQVSGQGDSLHEHIANLAGSPAIKKGILQTVKVVDELVKVMGRHKPENIVIEMARENQTTQKGQKNSRERMKRIEEGIKELGSQILKEHPVENTQLQNEKLYLYYLQNGRDMYVDQELDINRLSDYDVDAIVPQSFLKDDSIDNKVLTRSDKNRGKSDNVPSEEVVKKMKNYWRQLLNAKLITQRKFDNLTKAERGGLSELDKAGFIKRQLVETRQITKHVAQILDSRMNTKYDENDKLIREVKVITLKSKLVSDFRKDFQFYKVREINNYHHAHDAYLNAVVGTALIKKYPKLESEFVYGDYKVYDVRKMIAKSEQEIGKATAKYFFYSNIMNFFKTEITLANGEIRKRPLIETNGETGEIVWDKGRDFATVRKVLSMPQVNIVKKTEVQTGGFSKESILPKRNSDKLIARKKDWDPKKYGGFDSPTVAYSVLVVAKVEKGKSKKLKSVKELLGITIMERSSFEKNPIDFLEAKGYKEVKKDLIIKLPKYSLFELENGRKRMLASAGELQKGNELALPSKYVNFLYLASHYEKLKGSPEDNEQKQLFVEQHKHYLDEIIEQISEFSKRVILADANLDKVLSAYNKHRDKPIREQAENIIHLFTLTNLGAPAAFKYFDTTIDRKRYTSTKEVLDATLIHQSITGLYETRIDLSQLGGDAYPYDVPDYASLGSGSPKKKRKVEDPKKKRKVX

SEQ ID NO: 98 - protein, 2183 aa, synthetic construct
  REGION 1..2183: note = V47 fusion
  SITE 2183: note = misc_feature - Xaa =
MPAAKRVKLDGSNHDQEFDPPKVYPPVPAEKRKPIRVLSLFDGIATGLLVLKDLGIQVDRYIASEVCEDSITVGMVRHQGKIMYVGDVRSVTQKHIQEWGPFDLVIGGSPCNDLSIVNPARKGLYEGTGRLFFEFYRLLHDARPKEGDDRPFFWLFENVVAMGVSDKRDISRFLESNPVMIDAKEVSAAHRARYFWGNLPGMNRPLASTVNDKLELQECLEHGRIAKFSKVRTITTRSNSIKQGKDQHFPVFMNEKEDILWCTEMERVFGFPVHYTDVSNMSRLARQRLLGRSWSVPVIRHLFAPLKEYFACVSSGNSNANSRGPSFSSGLVPLSLRGSHMFETVPVWRRQPVRVLSLFEDIKKELTSLGFLESGSDPGQLKHVVDVTDTVRKDVEEWGPFDLVYGATPPLGHTCDRPPSWYLFQFHRLLQYARPKPGSPRPFFWMFVDNLVLNKEDLDVASRFLEMEPVTIPDVHGGSLQNAVRVWSNIPAIRSSRHWALVSEEELSLLAQNKQSSKLAAKWPTKLVKNCFLPLREYFKYFSGGPSSGAPPPSGGSPAGSPTSTEEGTSESATPESGPGTSTEPSEGSAPGSPAGSPTSTEEGTSTEPSEGSAPGTSTEPSERTLLTFRDVAIEFSLEEWQCLDTAQRNLYRKVMFENYRNLVFLGIAVSKPHLITCLEQGKEPWNSGSGSGSGGSGSGGSGSGSGGSGSGGSGSGETPGTSEGGPGTSTEPSEGSAPGSPAGSPTSTEEGTSTEPSEGSAPGTSTEPSEPKKKRKVMDKKYSIGLAIGTNSVGWAVITDEYKVPSKKFKVLGNTDRHSIKKNLIGALLFDSGETAEATRLKRTARRRYTRRKNRICYLQEIFSNEMAKVDDSFFHRLEESFLVEEDKKHERHPIFGNIVDEVAYHEKYPTIYHLRKKLVDSTDKADLRLIYLALAHMIKFRGHFLIEGDLNPDNSDVDKLFIQLVQTYNQLFEENPINASGVDAKAILSARLSKSRRLENLIAQLPGEKKNGLFGNLIALSLGLTPNFKSNFDLAEDAKLQLSKDTYDDDLDNLLAQIGDQYADLFLAAKNLSDAILLSDILRVNTEITKAPLSASMIKRYDEHHQDLTLLKALVRQQLPEKYKEIFFDQSKNGYAGYIDGGASQEEFYKFIKPILEKMDGTEELLVKLNREDLLRKQRTFDNGSIPHQIHLGELHAILRRQEDFYPFLKDNREKIEKILTFRIPYYVGPLARGNSRFAWMTRKSEETITPWNFEEVVDKGASAQSFIERMTNFDKNLPNEKVLPKHSLLYEYFTVYNELTKVKYVTEGMRKPAFLSGEQKKAIVDLLFKTNRKVTVKQLKEDYFKKIECFDSVEISGVEDRFNASLGTYHDLLKIIKDKDFLDNEENEDILEDIVLTLTLFEDREMIEERLKTYAHLFDDKVMKQLKRRRYTGWGRLSRKLINGIRDKQSGKTILDFLKSDGFANRNFMQLIHDDSLTFKEDIQKAQVSGQGDSLHEHIANLAGSPAIKKGILQTVKVVDELVKVMGRHKPENIVIEMARENQTTQKGQKNSRERMKRIEEGIKELGSQILKEHPVENTQLQNEKLYLYYLQNGRDMYVDQELDINRLSDYDVDAIVPQSFLKDDSIDNKVLTRSDKNRGKSDNVPSEEVVKKMKNYWRQLLNAKLITQRKFDNLTKAERGGLSELDKAGFIKRQLVETRQITKHVAQILDSRMNTKYDENDKLIREVKVITLKSKLVSDFRKDFQFYKVREINNYHHAHDAYLNAVVGTALIKKYPKLESEFVYGDYKVYDVRKMIAKSEQEIGKATAKYFFYSNIMNFFKTEITLANGEIRKRPLIETNGETGEIVWDKGRDFATVRKVLSMPQVNIVKKTEVQTGGFSKESILPKRNSDKLIARKKDWDPKKYGGFDSPTVAYSVLVVAKVEKGKSKKLKSVKELLGITIMERSSFEKNPIDFLEAKGYKEVKKDLIIKLPKYSLFELENGRKRMLASAGELQKGNELALPSKYVNFLYLASHYEKLKGSPEDNEQKQLFVEQHKHYLDEIIEQISEFSKRVILADANLDKVLSAYNKHRDKPIREQAENIIHLFTLTNLGAPAAFKYFDTTIDRKRYTSTKEVLDATLIHQSITGLYETRIDLSQLGGDAYPYDVPDYASLGSGSPKKKRKVEDPKKKRKVDGLEX

SEQ ID NO: 99 - protein, 2183 aa, synthetic construct
  REGION 1..2183: note = V48 fusion
  SITE 2183: note = misc_feature - Xaa =
MPAAKRVKLDGSNHDQEFDPPKVYPPVPAEKRKPIRVLSLFDGIATGLLVLKDLGIQVDRYIASEVCEDSITVGMVRHQGKIMYVGDVRSVTQKHIQEWGPFDLVIGGSPCNDLSIVNPARKGLYEGTGRLFFEFYRLLHDARPKEGDDRPFFWLFENVVAMGVSDKRDISRFLESNPVMIDAKEVSAAHRARYFWGNLPGMNRPLASTVNDKLELQECLEHGRIAKFSKVRTITTRSNSIKQGKDQHFPVFMNEKEDILWCTEMERVFGFPVHYTDVSNMSRLARQRLLGRSWSVPVIRHLFAPLKEYFACVSSGNSNANSRGPSFSSGLVPLSLRGSHMFETVPVWRRQPVRVLSLFEDIKKELTSLGFLESGSDPGQLKHVVDVTDTVRKDVEEWGPFDLVYGATPPLGHTCDRPPSWYLFQFHRLLQYARPKPGSPRPFFWMFVDNLVLNKEDLDVASRFLEMEPVTIPDVHGGSLQNAVRVWSNIPAIRSSRHWALVSEEELSLLAQNKQSSKLAAKWPTKLVKNCFLPLREYFKYFSGGPSSGAPPPSGGSPAGSPTSTEEGTSESATPESGPGTSTEPSEGSAPGSPAGSPTSTEEGTSTEPSEGSAPGTSTEPSERTLLTFEDVAVLFTRDEWRKLAPSQRNLYRDVMLENYRNLVSLGLPFTKPKVISLLQQGEDPWESGSGSGSGGSGSGGSGSGSGGSGSGGSGSGETPGTSEGGPGTSTEPSEGSAPGSPAGSPTSTEEGTSTEPSEGSAPGTSTEPSEPKKKRKVMDKKYSIGLAIGTNSVGWAVITDEYKVPSKKFKVLGNTDRHSIKKNLIGALLFDSGETAEATRLKRTARRRYTRRKNRICYLQEIFSNEMAKVDDSFFHRLEESFLVEEDKKHERHPIFGNIVDEVAYHEKYPTIYHLRKKLVDSTDKADLRLIYLALAHMIKFRGHFLIEGDLNPDNSDVDKLFIQLVQTYNQLFEENPINASGVDAKAILSARLSKSRRLENLIAQLPGEKKNGLFGNLIALSLGLTPNFKSNFDLAEDAKLQLSKDTYDDDLDNLLAQIGDQYADLFLAAKNLSDAILLSDILRVNTEITKAPLSASMIKRYDEHHQDLTLLKALVRQQLPEKYKEIFFDQSKNGYAGYIDGGASQEEFYKFIKPILEKMDGTEELLVKLNREDLLRKQRTFDNGSIPHQIHLGELHAILRRQEDFYPFLKDNREKIEKILTFRIPYYVGPLARGNSRFAWMTRKSEETITPWNFEEVVDKGASAQSFIERMTNFDKNLPNEKVLPKHSLLYEYFTVYNELTKVKYVTEGMRKPAFLSGEQKKAIVDLLFKTNRKVTVKQLKEDYFKKIECFDSVEISGVEDRFNASLGTYHDLLKIIKDKDFLDNEENEDILEDIVLTLTLFEDREMIEERLKTYAHLFDDKVMKQLKRRRYTGWGRLSRKLINGIRDKQSGKTILDFLKSDGFANRNFMQLIHDDSLTFKEDIQKAQVSGQGDSLHEHIANLAGSPAIKKGILQTVKVVDELVKVMGRHKPENIVIEMARENQTTQKGQKNSRERMKRIEEGIKELGSQILKEHPVENTQLQNEKLYLYYLQNGRDMYVDQELDINRLSDYDVDAIVPQSFLKDDSIDNKVLTRSDKNRGKSDNVPSEEVVKKMKNYWRQLLNAKLITQRKFDNLTKAERGGLSELDKAGFIKRQLVETRQITKHVAQILDSRMNTKYDENDKLIREVKVITLKSKLVSDFRKDFQFYKVREINNYHHAHDAYLNAVVGTALIKKYPKLESEFVYGDYKVYDVRKMIAKSEQEIGKATAKYFFYSNIMNFFKTEITLANGEIRKRPLIETNGETGEIVWDKGRDFATVRKVLSMPQVNIVKKTEVQTGGFSKESILPKRNSDKLIARKKDWDPKKYGGFDSPTVAYSVLVVAKVEKGKSKKLKSVKELLGITIMERSSFEKNPIDFLEAKGYKEVKKDLIIKLPKYSLFELENGRKRMLASAGELQKGNELALPSKYVNFLYLASHYEKLKGSPEDNEQKQLFVEQHKHYLDEIIEQISEFSKRVILADANLDKVLSAYNKHRDKPIREQAENIIHLFTLTNLGAPAAFKYFDTTIDRKRYTSTKEVLDATLIHQSITGLYETRIDLSQLGGDAYPYDVPDYASLGSGSPKKKRKVEDPKKKRKVDGLEX

SEQ ID NO: 100 - protein, 2183 aa, synthetic construct
  REGION 1..2183: note = V49 fusion
  SITE 2183: note = misc_feature - Xaa =
MPAAKRVKLDGSNHDQEFDPPKVYPPVPAEKRKPIRVLSLFDGIATGLLVLKDLGIQVDRYIASEVCEDSITVGMVRHQGKIMYVGDVRSVTQKHIQEWGPFDLVIGGSPCNDLSIVNPARKGLYEGTGRLFFEFYRLLHDARPKEGDDRPFFWLFENVVAMGVSDKRDISRFLESNPVMIDAKEVSAAHRARYFWGNLPGMNRPLASTVNDKLELQECLEHGRIAKFSKVRTITTRSNSIKQGKDQHFPVFMNEKEDILWCTEMERVFGFPVHYTDVSNMSRLARQRLLGRSWSVPVIRHLFAPLKEYFACVSSGNSNANSRGPSFSSGLVPLSLRGSHMFETVPVWRRQPVRVLSLFEDIKKELTSLGFLESGSDPGQLKHVVDVTDTVRKDVEEWGPFDLVYGATPPLGHTCDRPPSWYLFQFHRLLQYARPKPGSPRPFFWMFVDNLVLNKEDLDVASRFLEMEPVTIPDVHGGSLQNAVRVWSNIPAIRSSRHWALVSEEELSLLAQNKQSSKLAAKWPTKLVKNCFLPLREYFKYFSGGPSSGAPPPSGGSPAGSPTSTEEGTSESATPESGPGTSTEPSEGSAPGSPAGSPTSTEEGTSTEPSEGSAPGTSTEPSERTLVTFEDVAVYFSQEEWRLLDDAQRLLYRNVMLENFTLLASLGLASSKTHEITQLESWEEPFMSGSGSGSGGSGSGGSGSGSGGSGSGGSGSGETPGTSEGGPGTSTEPSEGSAPGSPAGSPTSTEEGTSTEPSEGSAPGTSTEPSEPKKKRKVMDKKYSIGLAIGTNSVGWAVITDEYKVPSKKFKVLGNTDRHSIKKNLIGALLFDSGETAEATRLKRTARRRYTRRKNRICYLQEIFSNEMAKVDDSFFHRLEESFLVEEDKKHERHPIFGNIVDEVAYHEKYPTIYHLRKKLVDSTDKADLRLIYLALAHMIKFRGHFLIEGDLNPDNSDVDKLFIQLVQTYNQLFEENPINASGVDAKAILSARLSKSRRLENLIAQLPGEKKNGLFGNLIALSLGLTPNFKSNFDLAEDAKLQLSKDTYDDDLDNLLAQIGDQYADLFLAAKNLSDAILLSDILRVNTEITKAPLSASMIKRYDEHHQDLTLLKALVRQQLPEKYKEIFFDQSKNGYAGYIDGGASQEEFYKFIKPILEKMDGTEELLVKLNREDLLRKQRTFDNGSIPHQIHLGELHAILRRQEDFYPFLKDNREKIEKILTFRIPYYVGPLARGNSRFAWMTRKSEETITPWNFEEVVDKGASAQSFIERMTNFDKNLPNEKVLPKHSLLYEYFTVYNELTKVKYVTEGMRKPAFLSGEQKKAIVDLLFKTNRKVTVKQLKEDYFKKIECFDSVEISGVEDRFNASLGTYHDLLKIIKDKDFLDNEENEDILEDIVLTLTLFEDREMIEERLKTYAHLFDDKVMKQLKRRRYTGWGRLSRKLINGIRDKQSGKTILDFLKSDGFANRNFMQLIHDDSLTFKEDIQKAQVSGQGDSLHEHIANLAGSPAIKKGILQTVKVVDELVKVMGRHKPENIVIEMARENQTTQKGQKNSRERMKRIEEGIKELGSQILKEHPVENTQLQNEKLYLYYLQNGRDMYVDQELDINRLSDYDVDAIVPQSFLKDDSIDNKVLTRSDKNRGKSDNVPSEEVVKKMKNYWRQLLNAKLITQRKFDNLTKAERGGLSELDKAGFIKRQLVETRQITKHVAQILDSRMNTKYDENDKLIREVKVITLKSKLVSDFRKDFQFYKVREINNYHHAHDAYLNAVVGTALIKKYPKLESEFVYGDYKVYDVRKMIAKSEQEIGKATAKYFFYSNIMNFFKTEITLANGEIRKRPLIETNGETGEIVWDKGRDFATVRKVLSMPQVNIVKKTEVQTGGFSKESILPKRNSDKLIARKKDWDPKKYGGFDSPTVAYSVLVVAKVEKGKSKKLKSVKELLGITIMERSSFEKNPIDFLEAKGYKEVKKDLIIKLPKYSLFELENGRKRMLASAGELQKGNELALPSKYVNFLYLASHYEKLKGSPEDNEQKQLFVEQHKHYLDEIIEQISEFSKRVILADANLDKVLSAYNKHRDKPIREQAENIIHLFTLTNLGAPAAFKYFDTTIDRKRYTSTKEVLDATLIHQSITGLYETRIDLSQLGGDAYPYDVPDYASLGSGSPKKKRKVEDPKKKRKVDGLEX

SEQ ID NO: 101 - protein, 2198 aa, synthetic construct
  REGION 1..2198: note = V50 fusion
  SITE 2198: note = misc_feature - Xaa =
MVPAAKRVKLDGSDKKYSIGLAIGTNSVGWAVITDEYKVPSKKFKVLGNTDRHSIKKNLIGALLFDSGETAEATRLKRTARRRYTRRKNRICYLQEIFSNEMAKVDDSFFHRLEESFLVEEDKKHERHPIFGNIVDEVAYHEKYPTIYHLRKKLVDSTDKADLRLIYLALAHMIKFRGHFLIEGDLNPDNSDVDKLFIQLVQTYNQLFEENPINASGVDAKAILSARLSKSRRLENLIAQLPGEKKNGLFGNLIALSLGLTPNFKSNFDLAEDAKLQLSKDTYDDDLDNLLAQIGDQYADLFLAAKNLSDAILLSDILRVNTEITKAPLSASMIKRYDEHHQDLTLLKALVRQQLPEKYKEIFFDQSKNGYAGYIDGGASQEEFYKFIKPILEKMDGTEELLVKLNREDLLRKQRTFDNGSIPHQIHLGELHAILRRQEDFYPFLKDNREKIEKILTFRIPYYVGPLARGNSRFAWMTRKSEETITPWNFEEVVDKGASAQSFIERMTNFDKNLPNEKVLPKHSLLYEYFTVYNELTKVKYVTEGMRKPAFLSGEQKKAIVDLLFKTNRKVTVKQLKEDYFKKIECFDSVEISGVEDRFNASLGTYHDLLKIIKDKDFLDNEENEDILEDIVLTLTLFEDREMIEERLKTYAHLFDDKVMKQLKRRRYTGWGRLSRKLINGIRDKQSGKTILDFLKSDGFANRNFMQLIHDDSLTFKEDIQKAQVSGQGDSLHEHIANLAGSPAIKKGILQTVKVVDELVKVMGRHKPENIVIEMARENQTTQKGQKNSRERMKRIEEGIKELGSQILKEHPVENTQLQNEKLYLYYLQNGRDMYVDQELDINRLSDYDVDAIVPQSFLKDDSIDNKVLTRSDKNRGKSDNVPSEEVVKKMKNYWRQLLNAKLITQRKFDNLTKAERGGLSELDKAGFIKRQLVETRQITKHVAQILDSRMNTKYDENDKLIREVKVITLKSKLVSDFRKDFQFYKVREINNYHHAHDAYLNAVVGTALIKKYPKLESEFVYGDYKVYDVRKMIAKSEQEIGKATAKYFFYSNIMNFFKTEITLANGEIRKRPLIETNGETGEIVWDKGRDFATVRKVLSMPQVNIVKKTEVQTGGFSKESILPKRNSDKLIARKKDWDPKKYGGFDSPTVAYSVLVVAKVEKGKSKKLKSVKELLGITIMERSSFEKNPIDFLEAKGYKEVKKDLIIKLPKYSLFELENGRKRMLASAGELQKGNELALPSKYVNFLYLASHYEKLKGSPEDNEQKQLFVEQHKHYLDEIIEQISEFSKRVILADANLDKVLSAYNKHRDKPIREQAENIIHLFTLTNLGAPAAFKYFDTTIDRKRYTSTKEVLDATLIHQSITGLYETRIDLSQLGGDAYPYDVPDYASLGSGSPKKKRKVEDPKKKRKVDGGGPSSGAPPPSGGSPAGSPTSTEEGTSESATPESGPGTSTEPSEGSAPGSPAGSPTSTEEGTSTEPSEGSAPGTSTEPSEMGPMEIYKTVSAWKRQPVRVLSLFRNIDKVLKSLGFLESGSGSGGGTLKYVEDVTNVVRRDVEKWGPFDLVYGSTQPLGSSCDRCPGWYMFQFHRILQYALPRQESQRPFFWIFMDNLLLTEDDQETTTRFLQTEAVTLQDVRGRDYQNAMRVWSNIPGLKSKHAPLTPKEEEYLQAQVRSRSKLDAPKVDLLVKNCLLPLREYFKYFSQNSLPLSSGNSNANSRGPSFSSGLVPLSLRGSHMNHDQEFDPPKVYPPVPAEKRKPIRVLSLFDGIATGLLVLKDLGIQVDRYIASEVCEDSITVGMVRHQGKIMYVGDVRSVTQKHIQEWGPFDLVIGGSPCNDLSIVNPARKGLYEGTGRLFFEFYRLLHDARPKEGDDRPFFWLFENVVAMGVSDKRDISRFLESNPVMIDAKEVSAAHRARYFWGNLPGMNRPLASTVNDKLELQECLEHGRIAKFSKVRTITTRSNSIKQGKDQHFPVFMNEKEDILWCTEMERVFGFPVHYTDVSNMSRLARQRLLGRSWSVPVIRHLFAPLKEYFACVDGSGSETPGTSESATPESRTLVTFKDVFVDFTREEWKLLDTAQQIVYRNVMLENYKNLVSLGYQLTKPDVILRLEKGEEPGSGSETPGTSESATPESRTLVTFKDVFVDFTREEWKLLDTAQQIVYRNVMLENYKNLVSLGYQLTKPDVILRLEKGEEPX

SEQ ID NO: 102 - protein, 2277 aa, synthetic construct
  REGION 1..2277: note = V51 fusion
  SITE 2277: note = misc_feature - Xaa =
MVPAAKRVKLDGSDKKYSIGLAIGTNSVGWAVITDEYKVPSKKFKVLGNTDRHSIKKNLIGALLFDSGETAEATRLKRTARRRYTRRKNRICYLQEIFSNEMAKVDDSFFHRLEESFLVEEDKKHERHPIFGNIVDEVAYHEKYPTIYHLRKKLVDSTDKADLRLIYLALAHMIKFRGHFLIEGDLNPDNSDVDKLFIQLVQTYNQLFEENPINASGVDAKAILSARLSKSRRLENLIAQLPGEKKNGLFGNLIALSLGLTPNFKSNFDLAEDAKLQLSKDTYDDDLDNLLAQIGDQYADLFLAAKNLSDAILLSDILRVNTEITKAPLSASMIKRYDEHHQDLTLLKALVRQQLPEKYKEIFFDQSKNGYAGYIDGGASQEEFYKFIKPILEKMDGTEELLVKLNREDLLRKQRTFDNGSIPHQIHLGELHAILRRQEDFYPFLKDNREKIEKILTFRIPYYVGPLARGNSRFAWMTRKSEETITPWNFEEVVDKGASAQSFIERMTNFDKNLPNEKVLPKHSLLYEYFTVYNELTKVKYVTEGMRKPAFLSGEQKKAIVDLLFKTNRKVTVKQLKEDYFKKIECFDSVEISGVEDRFNASLGTYHDLLKIIKDKDFLDNEENEDILEDIVLTLTLFEDREMIEERLKTYAHLFDDKVMKQLKRRRYTGWGRLSRKLINGIRDKQSGKTILDFLKSDGFANRNFMQLIHDDSLTFKEDIQKAQVSGQGDSLHEHIANLAGSPAIKKGILQTVKVVDELVKVMGRHKPENIVIEMARENQTTQKGQKNSRERMKRIEEGIKELGSQILKEHPVENTQLQNEKLYLYYLQNGRDMYVDQELDINRLSDYDVDAIVPQSFLKDDSIDNKVLTRSDKNRGKSDNVPSEEVVKKMKNYWRQLLNAKLITQRKFDNLTKAERGGLSELDKAGFIKRQLVETRQITKHVAQILDSRMNTKYDENDKLIREVKVITLKSKLVSDFRKDFQFYKVREINNYHHAHDAYLNAVVGTALIKKYPKLESEFVYGDYKVYDVRKMIAKSEQEIGKATAKYFFYSNIMNFFKTEITLANGEIRKRPLIETNGETGEIVWDKGRDFATVRKVLSMPQVNIVKKTEVQTGGFSKESILPKRNSDKLIARKKDWDPKKYGGFDSPTVAYSVLVVAKVEKGKSKKLKSVKELLGITIMERSSFEKNPIDFLEAKGYKEVKKDLIIKLPKYSLFELENGRKRMLASAGELQKGNELALPSKYVNFLYLASHYEKLKGSPEDNEQKQLFVEQHKHYLDEIIEQISEFSKRVILADANLDKVLSAYNKHRDKPIREQAENIIHLFTLTNLGAPAAFKYFDTTIDRKRYTSTKEVLDATLIHQSITGLYETRIDLSQLGGDAYPYDVPDYASLGSGSPKKKRKVEDPKKKRKVDGGGPSSGAPPPSGGSPAGSPTSTEEGTSESATPESGPGTSTEPSEGSAPGSPAGSPTSTEEGTSTEPSEGSAPGTSTEPSEMGPMEIYKTVSAWKRQPVRVLSLFRNIDKVLKSLGFLESGSGSGGGTLKYVEDVTNVVRRDVEKWGPFDLVYGSTQPLGSSCDRCPGWYMFQFHRILQYALPRQESQRPFFWIFMDNLLLTEDDQETTTRFLQTEAVTLQDVRGRDYQNAMRVWSNIPGLKSKHAPLTPKEEEYLQAQVRSRSKLDAPKVDLLVKNCLLPLREYFKYFSQNSLPLSSGNSNANSRGPSFSSGLVPLSLRGSHMNHDQEFDPPKVYPPVPAEKRKPIRVLSLFDGIATGLLVLKDLGIQVDRYIASEVCEDSITVGMVRHQGKIMYVGDVRSVTQKHIQEWGPFDLVIGGSPCNDLSIVNPARKGLYEGTGRLFFEFYRLLHDARPKEGDDRPFFWLFENVVAMGVSDKRDISRFLESNPVMIDAKEVSAAHRARYFWGNLPGMNRPLASTVNDKLELQECLEHGRIAKFSKVRTITTRSNSIKQGKDQHFPVFMNEKEDILWCTEMERVFGFPVHYTDVSNMSRLARQRLLGRSWSVPVIRHLFAPLKEYFACVDGSGSETPGTSESATPESRTLVTFKDVFVDFTREEWKLLDTAQQIVYRNVMLENYKNLVSLGYQLTKPDVILRLEKGEEPGSGSETPGTSESATPESRTLVTFKDVFVDFTREEWKLLDTAQQIVYRNVMLENYKNLVSLGYQLTKPDVILRLEKGEEPGSGSETPGTSESATPESRTLVTFKDVFVDFTREEWKLLDTAQQIVYRNVMLENYKNLVSLGYQLTKPDVILRLEKGEEPX

SEQ ID NO: 103 - protein, 2273 aa, synthetic construct
  REGION 1..2273: note = V52 fusion
  SITE 2273: note = misc_feature - Xaa =
MVPAAKRVKLDGSDKKYSIGLAIGTNSVGWAVITDEYKVPSKKFKVLGNTDRHSIKKNLIGALLFDSGETAEATRLKRTARRRYTRRKNRICYLQEIFSNEMAKVDDSFFHRLEESFLVEEDKKHERHPIFGNIVDEVAYHEKYPTIYHLRKKLVDSTDKADLRLIYLALAHMIKFRGHFLIEGDLNPDNSDVDKLFIQLVQTYNQLFEENPINASGVDAKAILSARLSKSRRLENLIAQLPGEKKNGLFGNLIALSLGLTPNFKSNFDLAEDAKLQLSKDTYDDDLDNLLAQIGDQYADLFLAAKNLSDAILLSDILRVNTEITKAPLSASMIKRYDEHHQDLTLLKALVRQQLPEKYKEIFFDQSKNGYAGYIDGGASQEEFYKFIKPILEKMDGTEELLVKLNREDLLRKQRTFDNGSIPHQIHLGELHAILRRQEDFYPFLKDNREKIEKILTFRIPYYVGPLARGNSRFAWMTRKSEETITPWNFEEVVDKGASAQSFIERMTNFDKNLPNEKVLPKHSLLYEYFTVYNELTKVKYVTEGMRKPAFLSGEQKKAIVDLLFKTNRKVTVKQLKEDYFKKIECFDSVEISGVEDRFNASLGTYHDLLKIIKDKDFLDNEENEDILEDIVLTLTLFEDREMIEERLKTYAHLFDDKVMKQLKRRRYTGWGRLSRKLINGIRDKQSGKTILDFLKSDGFANRNFMQLIHDDSLTFKEDIQKAQVSGQGDSLHEHIANLAGSPAIKKGILQTVKVVDELVKVMGRHKPENIVIEMARENQTTQKGQKNSRERMKRIEEGIKELGSQILKEHPVENTQLQNEKLYLYYLQNGRDMYVDQELDINRLSDYDVDAIVPQSFLKDDSIDNKVLTRSDKNRGKSDNVPSEEVVKKMKNYWRQLLNAKLITQRKFDNLTKAERGGLSELDKAGFIKRQLVETRQITKHVAQILDSRMNTKYDENDKLIREVKVITLKSKLVSDFRKDFQFYKVREINNYHHAHDAYLNAVVGTALIKKYPKLESEFVYGDYKVYDVRKMIAKSEQEIGKATAKYFFYSNIMNFFKTEITLANGEIRKRPLIETNGETGEIVWDKGRDFATVRKVLSMPQVNIVKKTEVQTGGFSKESILPKRNSDKLIARKKDWDPKKYGGFDSPTVAYSVLVVAKVEKGKSKKLKSVKELLGITIMERSSFEKNPIDFLEAKGYKEVKKDLIIKLPKYSLFELENGRKRMLASAGELQKGNELALPSKYVNFLYLASHYEKLKGSPEDNEQKQLFVEQHKHYLDEIIEQISEFSKRVILADANLDKVLSAYNKHRDKPIREQAENIIHLFTLTNLGAPAAFKYFDTTIDRKRYTSTKEVLDATLIHQSITGLYETRIDLSQLGGDAYPYDVPDYASLGSGSPKKKRKVEDPKKKRKVDGGGPSSGAPPPSGGSPAGSPTSTEEGTSESATPESGPGTSTEPSEGSAPGSPAGSPTSTEEGTSTEPSEGSAPGTSTEPSERTLVTFKDVFVDFTREEWKLLDTAQQIVYRNVMLENYKNLVSLGYQLTKPDVILRLEKGEEPSGSETPGTSESATPESGPGSPAGSPTSTEEGTSESATPESGPGSEPATSGSETPGTSESATPESGPGTSTEPSEGSAPGTSTEPSESATPESMGPMEIYKTVSAWKRQPVRVLSLFRNIDKVLKSLGFLESGSGSGGGTLKYVEDVTNVVRRDVEKWGPFDLVYGSTQPLGSSCDRCPGWYMFQFHRILQYALPRQESQRPFFWIFMDNLLLTEDDQETTTRFLQTEAVTLQDVRGRDYQNAMRVWSNIPGLKSKHAPLTPKEEEYLQAQVRSRSKLDAPKVDLLVKNCLLPLREYFKYFSQNSLPLSSGNSNANSRGPSFSSGLVPLSLRGSHMNHDQEFDPPKVYPPVPAEKRKPIRVLSLFDGIATGLLVLKDLGIQVDRYIASEVCEDSITVGMVRHQGKIMYVGDVRSVTQKHIQEWGPFDLVIGGSPCNDLSIVNPARKGLYEGTGRLFFEFYRLLHDARPKEGDDRPFFWLFENVVAMGVSDKRDISRFLESNPVMIDAKEVSAAHRARYFWGNLPGMNRPLASTVNDKLELQECLEHGRIAKFSKVRTITTRSNSIKQGKDQHFPVFMNEKEDILWCTEMERVFGFPVHYTDVSNMSRLARQRLLGRSWSVPVIRHLFAPLKEYFACVDGSGSETPGTSESATPESRTLVTFKDVFVDFTREEWKLLDTAQQIVYRNVMLENYKNLVSLGYQLTKPDVILRLEKGEEPX

SEQ ID NO: 104 - protein, 2311 aa, synthetic construct
  REGION 1..2311: note = V53 fusion
  SITE 2311: note = misc_feature - Xaa =
MVPAAKRVKLDGSDKKYSIGLAIGTNSVGWAVITDEYKVPSKKFKVLGNTDRHSIKKNLIGALLFDSGETAEATRLKRTARRRYTRRKNRICYLQEIFSNEMAKVDDSFFHRLEESFLVEEDKKHERHPIFGNIVDEVAYHEKYPTIYHLRKKLVDSTDKADLRLIYLALAHMIKFRGHFLIEGDLNPDNSDVDKLFIQLVQTYNQLFEENPINASGVDAKAILSARLSKSRRLENLIAQLPGEKKNGLFGNLIALSLGLTPNFKSNFDLAEDAKLQLSKDTYDDDLDNLLAQIGDQYADLFLAAKNLSDAILLSDILRVNTEITKAPLSASMIKRYDEHHQDLTLLKALVRQQLPEKYKEIFFDQSKNGYAGYIDGGASQEEFYKFIKPILEKMDGTEELLVKLNREDLLRKQRTFDNGSIPHQIHLGELHAILRRQEDFYPFLKDNREKIEKILTFRIPYYVGPLARGNSRFAWMTRKSEETITPWNFEEVVDKGASAQSFIERMTNFDKNLPNEKVLPKHSLLYEYFTVYNELTKVKYVTEGMRKPAFLSGEQKKAIVDLLFKTNRKVTVKQLKEDYFKKIECFDSVEISGVEDRFNASLGTYHDLLKIIKDKDFLDNEENEDILEDIVLTLTLFEDREMIEERLKTYAHLFDDKVMKQLKRRRYTGWGRLSRKLINGIRDKQSGKTILDFLKSDGFANRNFMQLIHDDSLTFKEDIQKAQVSGQGDSLHEHIANLAGSPAIKKGILQTVKVVDELVKVMGRHKPENIVIEMARENQTTQKGQKNSRERMKRIEEGIKELGSQILKEHPVENTQLQNEKLYLYYLQNGRDMYVDQELDINRLSDYDVDAIVPQSFLKDDSIDNKVLTRSDKNRGKSDNVPSEEVVKKMKNYWRQLLNAKLITQRKFDNLTKAERGGLSELDKAGFIKRQLVETRQITKHVAQILDSRMNTKYDENDKLIREVKVITLKSKLVSDFRKDFQFYKVREINNYHHAHDAYLNAVVGTALIKKYPKLESEFVYGDYKVYDVRKMIAKSEQEIGKATAKYFFYSNIMNFFKTEITLANGEIRKRPLIETNGETGEIVWDKGRDFATVRKVLSMPQVNIVKKTEVQTGGFSKESILPKRNSDKLIARKKDWDPKKYGGFDSPTVAYSVLVVAKVEKGKSKKLKSVKELLGITIMERSSFEKNPIDFLEAKGYKEVKKDLIIKLPKYSLFELENGRKRMLASAGELQKGNELALPSKYVNFLYLASHYEKLKGSPEDNEQKQLFVEQHKHYLDEIIEQISEFSKRVILADANLDKVLSAYNKHRDKPIREQAENIIHLFTLTNLGAPAAFKYFDTTIDRKRYTSTKEVLDATLIHQSITGLYETRIDLSQLGGDAYPYDVPDYASLGSGSPKKKRKVEDPKKKRKVDGGGPSSGAPPPSGGSPAGSPTSTEEGTSESATPESGPGTSTEPSEGSAPGSPAGSPTSTEEGTSTEPSEGSAPGTSTEPSEMNNSQGRVTFEDVTVNFTQGEWQRLNPEQRNLYRDVMLENYSNLVSVGQGETTKPDVILRLEQGKEPWLEEEEVLGSGRAEKNGDIGGQIWKPKDVKESLSGSETPGTSESATPESGPGSPAGSPTSTEEGTSESATPESGPGSEPATSGSETPGTSESATPESGPGTSTEPSEGSAPGTSTEPSESATPESMGPMEIYKTVSAWKRQPVRVLSLFRNIDKVLKSLGFLESGSGSGGGTLKYVEDVTNVVRRDVEKWGPFDLVYGSTQPLGSSCDRCPGWYMFQFHRILQYALPRQESQRPFFWIFMDNLLLTEDDQETTTRFLQTEAVTLQDVRGRDYQNAMRVWSNIPGLKSKHAPLTPKEEEYLQAQVRSRSKLDAPKVDLLVKNCLLPLREYFKYFSQNSLPLSSGNSNANSRGPSFSSGLVPLSLRGSHMNHDQEFDPPKVYPPVPAEKRKPIRVLSLFDGIATGLLVLKDLGIQVDRYIASEVCEDSITVGMVRHQGKIMYVGDVRSVTQKHIQEWGPFDLVIGGSPCNDLSIVNPARKGLYEGTGRLFFEFYRLLHDARPKEGDDRPFFWLFENVVAMGVSDKRDISRFLESNPVMIDAKEVSAAHRARYFWGNLPGMNRPLASTVNDKLELQECLEHGRIAKFSKVRTITTRSNSIKQGKDQHFPVFMNEKEDILWCTEMERVFGFPVHYTDVSNMSRLARQRLLGRSWSVPVIRHLFAPLKEYFACVDGSGSETPGTSESATPESRTLVTFKDVFVDFTREEWKLLDTAQQIVYRNVMLENYKNLVSLGYQLTKPDVILRLEKGEEPX

SEQ ID NO: 105 - protein, 2314 aa, synthetic construct
  REGION 1..2314: note = V54 fusion
  SITE 2314: note = misc_feature - Xaa =
MVRTLVTFKDVFVDFTREEWKLLDTAQQIVYRNVMLENYKNLVSLGYQLTKPDVILRLEKGEEPGGPSSGAPPPSGGSPAGSPTSTEEGTSESATPESGPGTSTEPSEGSAPGSPAGSPTSTEEGTSTEPSEGSAPGTSTEPSEPKKKRKVMNHDQEFDPPKVYPPVPAEKRKPIRVLSLFDGIATGLLVLKDLGIQVDRYIASEVCEDSITVGMVRHQGKIMYVGDVRSVTQKHIQEWGPFDLVIGGSPCNDLSIVNPARKGLYEGTGRLFFEFYRLLHDARPKEGDDRPFFWLFENVVAMGVSDKRDISRFLESNPVMIDAKEVSAAHRARYFWGNLPGMNRPLASTVNDKLELQECLEHGRIAKFSKVRTITTRSNSIKQGKDQHFPVFMNEKEDILWCTEMERVFGFPVHYTDVSNMSRLARQRLLGRSWSVPVIRHLFAPLKEYFACVSSGNSNANSRGPSFSSGLVPLSLRGSHMFETVPVWRRQPVRVLSLFEDIKKELTSLGFLESGSDPGQLKHVVDVTDTVRKDVEEWGPFDLVYGATPPLGHTCDRPPSWYLFQFHRLLQYARPKPGSPRPFFWMFVDNLVLNKEDLDVASRFLEMEPVTIPDVHGGSLQNAVRVWSNIPAIRSSRHWALVSEEELSLLAQNKQSSKLAAKWPTKLVKNCFLPLREYFKYFSDGSGSETPGTSESATPESMNNSQGRVTFEDVTVNFTQGEWQRLNPEQRNLYRDVMLENYSNLVSVGQGETTKPDVILRLEQGKEPWLEEEEVLGSGRAEKNGDIGGQIWKPKDVKESLGGPSSGAPPPSGGSPAGSPTSTEEGTSESATPESGPGTSTEPSEGSAPGSPAGSPTSTEEGTSTEPSEGSAPGTSTEPSEPKKKRKVMDKKYSIGLAIGTNSVGWAVITDEYKVPSKKFKVLGNTDRHSIKKNLIGALLFDSGETAEATRLKRTARRRYTRRKNRICYLQEIFSNEMAKVDDSFFHRLEESFLVEEDKKHERHPIFGNIVDEVAYHEKYPTIYHLRKKLVDSTDKADLRLIYLALAHMIKFRGHFLIEGDLNPDNSDVDKLFIQLVQTYNQLFEENPINASGVDAKAILSARLSKSRRLENLIAQLPGEKKNGLFGNLIALSLGLTPNFKSNFDLAEDAKLQLSKDTYDDDLDNLLAQIGDQYADLFLAAKNLSDAILLSDILRVNTEITKAPLSASMIKRYDEHHQDLTLLKALVRQQLPEKYKEIFFDQSKNGYAGYIDGGASQEEFYKFIKPILEKMDGTEELLVKLNREDLLRKQRTFDNGSIPHQIHLGELHAILRRQEDFYPFLKDNREKIEKILTFRIPYYVGPLARGNSRFAWMTRKSEETITPWNFEEVVDKGASAQSFIERMTNFDKNLPNEKVLPKHSLLYEYFTVYNELTKVKYVTEGMRKPAFLSGEQKKAIVDLLFKTNRKVTVKQLKEDYFKKIECFDSVEISGVEDRFNASLGTYHDLLKIIKDKDFLDNEENEDILEDIVLTLTLFEDREMIEERLKTYAHLFDDKVMKQLKRRRYTGWGRLSRKLINGIRDKQSGKTILDFLKSDGFANRNFMQLIHDDSLTFKEDIQKAQVSGQGDSLHEHIANLAGSPAIKKGILQTVKVVDELVKVMGRHKPENIVIEMARENQTTQKGQKNSRERMKRIEEGIKELGSQILKEHPVENTQLQNEKLYLYYLQNGRDMYVDQELDINRLSDYDVDAIVPQSFLKDDSIDNKVLTRSDKNRGKSDNVPSEEVVKKMKNYWRQLLNAKLITQRKFDNLTKAERGGLSELDKAGFIKRQLVETRQITKHVAQILDSRMNTKYDENDKLIREVKVITLKSKLVSDFRKDFQFYKVREINNYHHAHDAYLNAVVGTALIKKYPKLESEFVYGDYKVYDVRKMIAKSEQEIGKATAKYFFYSNIMNFFKTEITLANGEIRKRPLIETNGETGEIVWDKGRDFATVRKVLSMPQVNIVKKTEVQTGGFSKESILPKRNSDKLIARKKDWDPKKYGGFDSPTVAYSVLVVAKVEKGKSKKLKSVKELLGITIMERSSFEKNPIDFLEAKGYKEVKKDLIIKLPKYSLFELENGRKRMLASAGELQKGNELALPSKYVNFLYLASHYEKLKGSPEDNEQKQLFVEQHKHYLDEIIEQISEFSKRVILADANLDKVLSAYNKHRDKPIREQAENIIHLFTLTNLGAPAAFKYFDTTIDRKRYTSTKEVLDATLIHQSITGLYETRIDLSQLGGDAYPYDVPDYASLGSGSPKKKRKVEDPKKKRKVDGLEATNFSLLKQAGDVEENPGPMHX

SEQ ID NO: 106 - protein, 2311 aa, synthetic construct
  REGION 1..2311: note = V55 fusion
  SITE 2311: note = misc_feature - Xaa =
MVRTLVTFKDVFVDFTREEWKLLDTAQQIVYRNVMLENYKNLVSLGYQLTKPDVILRLEKGEEPGGPSSGAPPPSGGSPAGSPTSTEEGTSESATPESGPGTSTEPSEGSAPGSPAGSPTSTEEGTSTEPSEGSAPGTSTEPSEPKKKRKVNNSQGRVTFEDVTVNFTQGEWQRLNPEQRNLYRDVMLENYSNLVSVGQGETTKPDVILRLEQGKEPWLEEEEVLGSGRAEKNGDIGGQIWKPKDVKESLSGSETPGTSESATPESMNHDQEFDPPKVYPPVPAEKRKPIRVLSLFDGIATGLLVLKDLGIQVDRYIASEVCEDSITVGMVRHQGKIMYVGDVRSVTQKHIQEWGPFDLVIGGSPCNDLSIVNPARKGLYEGTGRLFFEFYRLLHDARPKEGDDRPFFWLFENVVAMGVSDKRDISRFLESNPVMIDAKEVSAAHRARYFWGNLPGMNRPLASTVNDKLELQECLEHGRIAKFSKVRTITTRSNSIKQGKDQHFPVFMNEKEDILWCTEMERVFGFPVHYTDVSNMSRLARQRLLGRSWSVPVIRHLFAPLKEYFACVSSGNSNANSRGPSFSSGLVPLSLRGSHMFETVPVWRRQPVRVLSLFEDIKKELTSLGFLESGSDPGQLKHVVDVTDTVRKDVEEWGPFDLVYGATPPLGHTCDRPPSWYLFQFHRLLQYARPKPGSPRPFFWMFVDNLVLNKEDLDVASRFLEMEPVTIPDVHGGSLQNAVRVWSNIPAIRSSRHWALVSEEELSLLAQNKQSSKLAAKWPTKLVKNCFLPLREYFKYFSGGPSSGAPPPSGGSPAGSPTSTEEGTSESATPESGPGTSTEPSEGSAPGSPAGSPTSTEEGTSTEPSEGSAPGTSTEPSEPKKKRKVMDKKYSIGLAIGTNSVGWAVITDEYKVPSKKFKVLGNTDRHSIKKNLIGALLFDSGETAEATRLKRTARRRYTRRKNRICYLQEIFSNEMAKVDDSFFHRLEESFLVEEDKKHERHPIFGNIVDEVAYHEKYPTIYHLRKKLVDSTDKADLRLIYLALAHMIKFRGHFLIEGDLNPDNSDVDKLFIQLVQTYNQLFEENPINASGVDAKAILSARLSKSRRLENLIAQLPGEKKNGLFGNLIALSLGLTPNFKSNFDLAEDAKLQLSKDTYDDDLDNLLAQIGDQYADLFLAAKNLSDAILLSDILRVNTEITKAPLSASMIKRYDEHHQDLTLLKALVRQQLPEKYKEIFFDQSKNGYAGYIDGGASQEEFYKFIKPILEKMDGTEELLVKLNREDLLRKQRTFDNGSIPHQIHLGELHAILRRQEDFYPFLKDNREKIEKILTFRIPYYVGPLARGNSRFAWMTRKSEETITPWNFEEVVDKGASAQSFIERMTNFDKNLPNEKVLPKHSLLYEYFTVYNELTKVKYVTEGMRKPAFLSGEQKKAIVDLLFKTNRKVTVKQLKEDYFKKIECFDSVEISGVEDRFNASLGTYHDLLKIIKDKDFLDNEENEDILEDIVLTLTLFEDREMIEERLKTYAHLFDDKVMKQLKRRRYTGWGRLSRKLINGIRDKQSGKTILDFLKSDGFANRNFMQLIHDDSLTFKEDIQKAQVSGQGDSLHEHIANLAGSPAIKKGILQTVKVVDELVKVMGRHKPENIVIEMARENQTTQKGQKNSRERMKRIEEGIKELGSQILKEHPVENTQLQNEKLYLYYLQNGRDMYVDQELDINRLSDYDVDAIVPQSFLKDDSIDNKVLTRSDKNRGKSDNVPSEEVVKKMKNYWRQLLNAKLITQRKFDNLTKAERGGLSELDKAGFIKRQLVETRQITKHVAQILDSRMNTKYDENDKLIREVKVITLKSKLVSDFRKDFQFYKVREINNYHHAHDAYLNAVVGTALIKKYPKLESEFVYGDYKVYDVRKMIAKSEQEIGKATAKYFFYSNIMNFFKTEITLANGEIRKRPLIETNGETGEIVWDKGRDFATVRKVLSMPQVNIVKKTEVQTGGFSKESILPKRNSDKLIARKKDWDPKKYGGFDSPTVAYSVLVVAKVEKGKSKKLKSVKELLGITIMERSSFEKNPIDFLEAKGYKEVKKDLIIKLPKYSLFELENGRKRMLASAGELQKGNELALPSKYVNFLYLASHYEKLKGSPEDNEQKQLFVEQHKHYLDEIIEQISEFSKRVILADANLDKVLSAYNKHRDKPIREQAENIIHLFTLTNLGAPAAFKYFDTTIDRKRYTSTKEVLDATLIHQSITGLYETRIDLSQLGGDAYPYDVPDYASLGSGSPKKKRKVEDPKKKRKVDGLEATNFSLLKQAGDVEENPGPMHX

SEQ ID NO: 107 - protein, 2373 aa, synthetic construct
  REGION 1..2373: note = V56 fusion
  SITE 2373: note = misc_feature - Xaa =
MNHDQEFDPPKVYPPVPAEKRKPIRVLSLFDGIATGLLVLKDLGIQVDRYIASEVCEDSITVGMVRHQGKIMYVGDVRSVTQKHIQEWGPFDLVIGGSPCNDLSIVNPARKGLYEGTGRLFFEFYRLLHDARPKEGDDRPFFWLFENVVAMGVSDKRDISRFLESNPVMIDAKEVSAAHRARYFWGNLPGMNRPLASTVNDKLELQECLEHGRIAKFSKVRTITTRSNSIKQGKDQHFPVFMNEKEDILWCTEMERVFGFPVHYTDVSNMSRLARQRLLGRSWSVPVIRHLFAPLKEYFACVSSGNSNANSRGPSFSSGLVPLSLRGSHMFETVPVWRRQPVRVLSLFEDIKKELTSLGFLESGSDPGQLKHVVDVTDTVRKDVEEWGPFDLVYGATPPLGHTCDRPPSWYLFQFHRLLQYARPKPGSPRPFFWMFVDNLVLNKEDLDVASRFLEMEPVTIPDVHGGSLQNAVRVWSNIPAIRSSRHWALVSEEELSLLAQNKQSSKLAAKWPTKLVKNCFLPLREYFKYFSGGPSSGAPPPSGGSPAGSPTSTEEGTSESATPESGPGTSTEPSEGSAPGSPAGSPTSTEEGTSTEPSEGSAPGTSTEPSERTLVTFKDVFVDFTREEWKLLDTAQQIVYRNVMLENYKNLVSLGYQLTKPDVILRLEKGEEPGGPSSGAPPPSGGSPAGSPTSTEEGTSESATPESGPGTSTEPSEGSAPGSPAGSPTSTEEGTSTEPSEGSAPGTSTEPSEPKKKRKVNNSQGRVTFEDVTVNFTQGEWQRLNPEQRNLYRDVMLENYSNLVSVGQGETTKPDVILRLEQGKEPWLEEEEVLGSGRAEKNGDIGGQIWKPKDVKESLGGPSSGAPPPSGGSPAGSPTSTEEGTSESATPESGPGTSTEPSEGSAPGSPAGSPTSTEEGTSTEPSEGSAPGTSTEPSEPKKKRKVMDKKYSIGLAIGTNSVGWAVITDEYKVPSKKFKVLGNTDRHSIKKNLIGALLFDSGETAEATRLKRTARRRYTRRKNRICYLQEIFSNEMAKVDDSFFHRLEESFLVEEDKKHERHPIFGNIVDEVAYHEKYPTIYHLRKKLVDSTDKADLRLIYLALAHMIKFRGHFLIEGDLNPDNSDVDKLFIQLVQTYNQLFEENPINASGVDAKAILSARLSKSRRLENLIAQLPGEKKNGLFGNLIALSLGLTPNFKSNFDLAEDAKLQLSKDTYDDDLDNLLAQIGDQYADLFLAAKNLSDAILLSDILRVNTEITKAPLSASMIKRYDEHHQDLTLLKALVRQQLPEKYKEIFFDQSKNGYAGYIDGGASQEEFYKFIKPILEKMDGTEELLVKLNREDLLRKQRTFDNGSIPHQIHLGELHAILRRQEDFYPFLKDNREKIEKILTFRIPYYVGPLARGNSRFAWMTRKSEETITPWNFEEVVDKGASAQSFIERMTNFDKNLPNEKVLPKHSLLYEYFTVYNELTKVKYVTEGMRKPAFLSGEQKKAIVDLLFKTNRKVTVKQLKEDYFKKIECFDSVEISGVEDRFNASLGTYHDLLKIIKDKDFLDNEENEDILEDIVLTLTLFEDREMIEERLKTYAHLFDDKVMKQLKRRRYTGWGRLSRKLINGIRDKQSGKTILDFLKSDGFANRNFMQLIHDDSLTFKEDIQKAQVSGQGDSLHEHIANLAGSPAIKKGILQTVKVVDELVKVMGRHKPENIVIEMARENQTTQKGQKNSRERMKRIEEGIKELGSQILKEHPVENTQLQNEKLYLYYLQNGRDMYVDQELDINRLSDYDVDAIVPQSFLKDDSIDNKVLTRSDKNRGKSDNVPSEEVVKKMKNYWRQLLNAKLITQRKFDNLTKAERGGLSELDKAGFIKRQLVETRQITKHVAQILDSRMNTKYDENDKLIREVKVITLKSKLVSDFRKDFQFYKVREINNYHHAHDAYLNAVVGTALIKKYPKLESEFVYGDYKVYDVRKMIAKSEQEIGKATAKYFFYSNIMNFFKTEITLANGEIRKRPLIETNGETGEIVWDKGRDFATVRKVLSMPQVNIVKKTEVQTGGFSKESILPKRNSDKLIARKKDWDPKKYGGFDSPTVAYSVLVVAKVEKGKSKKLKSVKELLGITIMERSSFEKNPIDFLEAKGYKEVKKDLIIKLPKYSLFELENGRKRMLASAGELQKGNELALPSKYVNFLYLASHYEKLKGSPEDNEQKQLFVEQHKHYLDEIIEQISEFSKRVILADANLDKVLSAYNKHRDKPIREQAENIIHLFTLTNLGAPAAFKYFDTTIDRKRYTSTKEVLDATLIHQSITGLYETRIDLSQLGGDAYPYDVPDYASLGSGSPKKKRKVEDPKKKRKVDGLEATNFSLLKQAGDVEENPGPMHX

SEQ ID NO: 108 - protein, 2656 aa, synthetic construct
  REGION 1..2656: note = V57 fusion
  SITE 2656: note = misc_feature - Xaa =
MPAAKRVKLDGSAKTVAYFYDPDVGNFHYGAGHPMKPHRLALTHSLVLHYGLYKKMIVFKPYQASQHDMCRFHSEDYIDFLQRVSPTNMQGFTKSLNAFNVGDDCPVFPGLFEFCSRYTGASLQGATQLNNKICDIAINWAGGLHHAKKFEASGFCYVNDIVIGILELLKYHPRVLYIDIDIHHGDGVQEAFYLTDRVMTVSFHKYGNYFFPGTGDMYEVGAESGRYYCLNVPLRDGIDDQSYKHLFQPVINQVVDFYQPTCIVLQCGADSLGCDRLGCFNLSIRGHGECVEYVKSFNIPLLVLGGGGYTVRNVARCWTYETSLLVEEAISEELPYSEYFEYFAPDFTLHPDVSTRIENQNSRQYLDQIRQTIFENLGGPSSGAPPPSGGSPAGSPTSTEEGTSESATPESGPGTSTEPSEGSAPGSPAGSPTSTEEGTSTEPSEGSAPGTSTEPSEPKKKRKVMDKKYSIGLAIGTNSVGWAVITDEYKVPSKKFKVLGNTDRHSIKKNLIGALLFDSGETAEATRLKRTARRRYTRRKNRICYLQEIFSNEMAKVDDSFFHRLEESFLVEEDKKHERHPIFGNIVDEVAYHEKYPTIYHLRKKLVDSTDKADLRLIYLALAHMIKFRGHFLIEGDLNPDNSDVDKLFIQLVQTYNQLFEENPINASGVDAKAILSARLSKSRRLENLIAQLPGEKKNGLFGNLIALSLGLTPNFKSNFDLAEDAKLQLSKDTYDDDLDNLLAQIGDQYADLFLAAKNLSDAILLSDILRVNTEITKAPLSASMIKRYDEHHQDLTLLKALVRQQLPEKYKEIFFDQSKNGYAGYIDGGASQEEFYKFIKPILEKMDGTEELLVKLNREDLLRKQRTFDNGSIPHQIHLGELHAILRRQEDFYPFLKDNREKIEKILTFRIPYYVGPLARGNSRFAWMTRKSEETITPWNFEEVVDKGASAQSFIERMTNFDKNLPNEKVLPKHSLLYEYFTVYNELTKVKYVTEGMRKPAFLSGEQKKAIVDLLFKTNRKVTVKQLKEDYFKKIECFDSVEISGVEDRFNASLGTYHDLLKIIKDKDFLDNEENEDILEDIVLTLTLFEDREMIEERLKTYAHLFDDKVMKQLKRRRYTGWGRLSRKLINGIRDKQSGKTILDFLKSDGFANRNFMQLIHDDSLTFKEDIQKAQVSGQGDSLHEHIANLAGSPAIKKGILQTVKVVDELVKVMGRHKPENIVIEMARENQTTQKGQKNSRERMKRIEEGIKELGSQILKEHPVENTQLQNEKLYLYYLQNGRDMYVDQELDINRLSDYDVDAIVPQSFLKDDSIDNKVLTRSDKNRGKSDNVPSEEVVKKMKNYWRQLLNAKLITQRKFDNLTKAERGGLSELDKAGFIKRQLVETRQITKHVAQILDSRMNTKYDENDKLIREVKVITLKSKLVSDFRKDFQFYKVREINNYHHAHDAYLNAVVGTALIKKYPKLESEFVYGDYKVYDVRKMIAKSEQEIGKATAKYFFYSNIMNFFKTEITLANGEIRKRPLIETNGETGEIVWDKGRDFATVRKVLSMPQVNIVKKTEVQTGGFSKESILPKRNSDKLIARKKDWDPKKYGGFDSPTVAYSVLVVAKVEKGKSKKLKSVKELLGITIMERSSFEKNPIDFLEAKGYKEVKKDLIIKLPKYSLFELENGRKRMLASAGELQKGNELALPSKYVNFLYLASHYEKLKGSPEDNEQKQLFVEQHKHYLDEIIEQISEFSKRVILADANLDKVLSAYNKHRDKPIREQAENIIHLFTLTNLGAPAAFKYFDTTIDRKRYTSTKEVLDATLIHQSITGLYETRIDLSQLGGDAYPYDVPDYASLGSGSPKKKRKVEDPKKKRKVDGSGSETPGTSESATPESRTLGQTGKKSEKGPVCWRKRVKSEYMRLRQLKRFRRADEVKSMFSSNRQKILERTEILNQEWKQRRIQPVHILTSVSSLRGTRECSVTSDLDFPTQVIPLKTLNAVASVPIMYSWSPLQQNFMVEDETVLHNIPYMGDEVLDQDGTFIEELIKNYDGKVHGDRECGFINDEIFVELVNALGQYNDDDDDDDGDDPEEREEKQKDLEDHRDDKESRPPRKFPSDKIFEAISSMFPDKGTAEELKEKYKELTEQQLPGALPPECTPNIDGPNAKSVQREQSLHSFHTLFCRRCFKYDCFLHPFHATPNTYKRKNTETALDNKPCGPQCYQHLEGAKEFAAALTAERIKTPPKRPGGRRRGRLPNNSSRPSTPTINVLESKDTDSDREAGTETGGENNDKEEEEKKDETSSSSEANSRCQTPIKMKPNIEPPENVEWSGAEASMFRVLIGTYYDNFCAIARLIGTKTCRQVYEFRVKESSIIAPAPAEDVDTPPRKKKRKHRLWAAHCRKIQLKKDGSSNHVYNYQPCDHPRQPCDSSCPCVIAQNFCEKFCQCSSECQNRFPGCRCKAQCNTKQCPCYLAVRECDPDLCLTCGAADHWDSKNVSCKNCSIQRGSKKHLLLAPSDVAGWGIFIKDPVQKNEFISEYCGEIISQDEADRRGKVYDKYMCSFLFNLNNDFVVDATRKGNKIRFANHSVNPNCYAKVMMVNGDHRIGIFAKRAIQTGEELFFDYRYSQADALKYVGIEREMEIPEGSGATNFSLLKQAGDVEENPGPMHX

SEQ ID NO: 109 - protein, 2353 aa, synthetic construct
  REGION 1..2353: note = V58 fusion
  SITE 2353: note = misc_feature - Xaa =
MPAAKRVKLDGSRTLVTFKDVFVDFTREEWKLLDTAQQIVYRNVMLENYKNLVSLGYQLTKPDVILRLEKGEEPGGPSSGAPPPSGGSPAGSPTSTEEGTSESATPESGPGTSTEPSEGSAPGSPAGSPTSTEEGTSTEPSEGSAPGTSTEPSEPKKKRKVMDKKYSIGLAIGTNSVGWAVITDEYKVPSKKFKVLGNTDRHSIKKNLIGALLFDSGETAEATRLKRTARRRYTRRKNRICYLQEIFSNEMAKVDDSFFHRLEESFLVEEDKKHERHPIFGNIVDEVAYHEKYPTIYHLRKKLVDSTDKADLRLIYLALAHMIKFRGHFLIEGDLNPDNSDVDKLFIQLVQTYNQLFEENPINASGVDAKAILSARLSKSRRLENLIAQLPGEKKNGLFGNLIALSLGLTPNFKSNFDLAEDAKLQLSKDTYDDDLDNLLAQIGDQYADLFLAAKNLSDAILLSDILRVNTEITKAPLSASMIKRYDEHHQDLTLLKALVRQQLPEKYKEIFFDQSKNGYAGYIDGGASQEEFYKFIKPILEKMDGTEELLVKLNREDLLRKQRTFDNGSIPHQIHLGELHAILRRQEDFYPFLKDNREKIEKILTFRIPYYVGPLARGNSRFAWMTRKSEETITPWNFEEVVDKGASAQSFIERMTNFDKNLPNEKVLPKHSLLYEYFTVYNELTKVKYVTEGMRKPAFLSGEQKKAIVDLLFKTNRKVTVKQLKEDYFKKIECFDSVEISGVEDRFNASLGTYHDLLKIIKDKDFLDNEENEDILEDIVLTLTLFEDREMIEERLKTYAHLFDDKVMKQLKRRRYTGWGRLSRKLINGIRDKQSGKTILDFLKSDGFANRNFMQLIHDDSLTFKEDIQKAQVSGQGDSLHEHIANLAGSPAIKKGILQTVKVVDELVKVMGRHKPENIVIEMARENQTTQKGQKNSRERMKRIEEGIKELGSQILKEHPVENTQLQNEKLYLYYLQNGRDMYVDQELDINRLSDYDVDAIVPQSFLKDDSIDNKVLTRSDKNRGKSDNVPSEEVVKKMKNYWRQLLNAKLITQRKFDNLTKAERGGLSELDKAGFIKRQLVETRQITKHVAQILDSRMNTKYDENDKLIREVKVITLKSKLVSDFRKDFQFYKVREINNYHHAHDAYLNAVVGTALIKKYPKLESEFVYGDYKVYDVRKMIAKSEQEIGKATAKYFFYSNIMNFFKTEITLANGEIRKRPLIETNGETGEIVWDKGRDFATVRKVLSMPQVNIVKKTEVQTGGFSKESILPKRNSDKLIARKKDWDPKKYGGFDSPTVAYSVLVVAKVEKGKSKKLKSVKELLGITIMERSSFEKNPIDFLEAKGYKEVKKDLIIKLPKYSLFELENGRKRMLASAGELQKGNELALPSKYVNFLYLASHYEKLKGSPEDNEQKQLFVEQHKHYLDEIIEQISEFSKRVILADANLDKVLSAYNKHRDKPIREQAENIIHLFTLTNLGAPAAFKYFDTTIDRKRYTSTKEVLDATLIHQSITGLYETRIDLSQLGGDAYPYDVPDYASLGSGSPKKKRKVEDPKKKRKVDGSGSETPGTSESATPESRTLGQTGKKSEKGPVCWRKRVKSEYMRLRQLKRFRRADEVKSMFSSNRQKILERTEILNQEWKQRRIQPVHILTSVSSLRGTRECSVTSDLDFPTQVIPLKTLNAVASVPIMYSWSPLQQNFMVEDETVLHNIPYMGDEVLDQDGTFIEELIKNYDGKVHGDRECGFINDEIFVELVNALGQYNDDDDDDDGDDPEEREEKQKDLEDHRDDKESRPPRKFPSDKIFEAISSMFPDKGTAEELKEKYKELTEQQLPGALPPECTPNIDGPNAKSVQREQSLHSFHTLFCRRCFKYDCFLHPFHATPNTYKRKNTETALDNKPCGPQCYQHLEGAKEFAAALTAERIKTPPKRPGGRRRGRLPNNSSRPSTPTINVLESKDTDSDREAGTETGGENNDKEEEEKKDETSSSSEANSRCQTPIKMKPNIEPPENVEWSGAEASMFRVLIGTYYDNFCAIARLIGTKTCRQVYEFRVKESSIIAPAPAEDVDTPPRKKKRKHRLWAAHCRKIQLKKDGSSNHVYNYQPCDHPRQPCDSSCPCVIAQNFCEKFCQCSSECQNRFPGCRCKAQCNTKQCPCYLAVRECDPDLCLTCGAADHWDSKNVSCKNCSIQRGSKKHLLLAPSDVAGWGIFIKDPVQKNEFISEYCGEIISQDEADRRGKVYDKYMCSFLFNLNNDFVVDATRKGNKIRFANHSVNPNCYAKVMMVNGDHRIGIFAKRAIQTGEELFFDYRYSQADALKYVGIEREMEIPEGSGATNFSLLKQAGDVEENPGPMHX

SEQ ID NO: 110 - protein, 2735 aa, synthetic construct
  REGION 1..2735: note = V59 fusion
  SITE 2735: note = misc_feature - Xaa =
MPAAKRVKLDGSRTLVTFKDVFVDFTREEWKLLDTAQQIVYRNVMLENYKNLVSLGYQLTKPDVILRLEKGEEPGGPSSGAPPPSGGSPAGSPTSTEEGTSESATPESGPGTSTEPSEGSAPGSPAGSPTSTEEGTSTEPSEGSAPGTSTEPSEMNHDQEFDPPKVYPPVPAEKRKPIRVLSLFDGIATGLLVLKDLGIQVDRYIASEVCEDSITVGMVRHQGKIMYVGDVRSVTQKHIQEWGPFDLVIGGSPCNDLSIVNPARKGLYEGTGRLFFEFYRLLHDARPKEGDDRPFFWLFENVVAMGVSDKRDISRFLESNPVMIDAKEVSAAHRARYFWGNLPGMNRPLASTVNDKLELQECLEHGRIAKFSKVRTITTRSNSIKQGKDQHFPVFMNEKEDILWCTEMERVFGFPVHYTDVSNMSRLARQRLLGRSWSVPVIRHLFAPLKEYFACVGGPSSGAPPPSGGSPAGSPTSTEEGTSESATPESGPGTSTEPSEGSAPGSPAGSPTSTEEGTSTEPSEGSAPGTSTEPSEPKKKRKVMDKKYSIGLAIGTNSVGWAVITDEYKVPSKKFKVLGNTDRHSIKKNLIGALLFDSGETAEATRLKRTARRRYTRRKNRICYLQEIFSNEMAKVDDSFFHRLEESFLVEEDKKHERHPIFGNIVDEVAYHEKYPTIYHLRKKLVDSTDKADLRLIYLALAHMIKFRGHFLIEGDLNPDNSDVDKLFIQLVQTYNQLFEENPINASGVDAKAILSARLSKSRRLENLIAQLPGEKKNGLFGNLIALSLGLTPNFKSNFDLAEDAKLQLSKDTYDDDLDNLLAQIGDQYADLFLAAKNLSDAILLSDILRVNTEITKAPLSASMIKRYDEHHQDLTLLKALVRQQLPEKYKEIFFDQSKNGYAGYIDGGASQEEFYKFIKPILEKMDGTEELLVKLNREDLLRKQRTFDNGSIPHQIHLGELHAILRRQEDFYPFLKDNREKIEKILTFRIPYYVGPLARGNSRFAWMTRKSEETITPWNFEEVVDKGASAQSFIERMTNFDKNLPNEKVLPKHSLLYEYFTVYNELTKVKYVTEGMRKPAFLSGEQKKAIVDLLFKTNRKVTVKQLKEDYFKKIECFDSVEISGVEDRFNASLGTYHDLLKIIKDKDFLDNEENEDILEDIVLTLTLFEDREMIEERLKTYAHLFDDKVMKQLKRRRYTGWGRLSRKLINGIRDKQSGKTILDFLKSDGFANRNFMQLIHDDSLTFKEDIQKAQVSGQGDSLHEHIANLAGSPAIKKGILQTVKVVDELVKVMGRHKPENIVIEMARENQTTQKGQKNSRERMKRIEEGIKELGSQILKEHPVENTQLQNEKLYLYYLQNGRDMYVDQELDINRLSDYDVDAIVPQSFLKDDSIDNKVLTRSDKNRGKSDNVPSEEVVKKMKNYWRQLLNAKLITQRKFDNLTKAERGGLSELDKAGFIKRQLVETRQITKHVAQILDSRMNTKYDENDKLIREVKVITLKSKLVSDFRKDFQFYKVREINNYHHAHDAYLNAVVGTALIKKYPKLESEFVYGDYKVYDVRKMIAKSEQEIGKATAKYFFYSNIMNFFKTEITLANGEIRKRPLIETNGETGEIVWDKGRDFATVRKVLSMPQVNIVKKTEVQTGGFSKESILPKRNSDKLIARKKDWDPKKYGGFDSPTVAYSVLVVAKVEKGKSKKLKSVKELLGITIMERSSFEKNPIDFLEAKGYKEVKKDLIIKLPKYSLFELENGRKRMLASAGELQKGNELALPSKYVNFLYLASHYEKLKGSPEDNEQKQLFVEQHKHYLDEIIEQISEFSKRVILADANLDKVLSAYNKHRDKPIREQAENIIHLFTLTNLGAPAAFKYFDTTIDRKRYTSTKEVLDATLIHQSITGLYETRIDLSQLGGDAYPYDVPDYASLGSGSPKKKRKVEDPKKKRKVDGSGSETPGTSESATPESRTLGQTGKKSEKGPVCWRKRVKSEYMRLRQLKRFRRADEVKSMFSSNRQKILERTEILNQEWKQRRIQPVHILTSVSSLRGTRECSVTSDLDFPTQVIPLKTLNAVASVPIMYSWSPLQQNFMVEDETVLHNIPYMGDEVLDQDGTFIEELIKNYDGKVHGDRECGFINDEIFVELVNALGQYNDDDDDDDGDDPEEREEKQKDLEDHRDDKESRPPRKFPSDKIFEAISSMFPDKGTAEELKEKYKELTEQQLPGALPPECTPNIDGPNAKSVQREQSLHSFHTLFCRRCFKYDCFLHPFHATPNTYKRKNTETALDNKPCGPQCYQHLEGAKEFAAALTAERIKTPPKRPGGRRRGRLPNNSSRPSTPTINVLESKDTDSDREAGTETGGENNDKEEEEKKDETSSSSEANSRCQTPIKMKPNIEPPENVEWSGAEASMFRVLIGTYYDNFCAIARLIGTKTCRQVYEFRVKESSIIAPAPAEDVDTPPRKKKRKHRLWAAHCRKIQLKKDGSSNHVYNYQPCDHPRQPCDSSCPCVIAQNFCEKFCQCSSECQNRFPGCRCKAQCNTKQCPCYLAVRECDPDLCLTCGAADHWDSKNVSCKNCSIQRGSKKHLLLAPSDVAGWGIFIKDPVQKNEFISEYCGEIISQDEADRRGKVYDKYMCSFLFNLNNDFVVDATRKGNKIRFANHSVNPNCYAKVMMVNGDHRIGIFAKRAIQTGEELFFDYRYSQADALKYVGIEREMEIPEGSGATNFSLLKQAGDVEENPGPMHX

SEQ ID NO: 111 - protein, 2417 aa, synthetic construct
  REGION 1..2417: note = V60 fusion
  SITE 2417: note = misc_feature - Xaa =
MPAAKRVKLDGSRTLVTFKDVFVDFTREEWKLLDTAQQIVYRNVMLENYKNLVSLGYQLTKPDVILRLEKGEEPGGPSSGAPPPSGGSPAGSPTSTEEGTSESATPESGPGTSTEPSEGSAPGSPAGSPTSTEEGTSTEPSEGSAPGTSTEPSEMNHDQEFDPPKVYPPVPAEKRKPIRVLSLFDGIATGLLVLKDLGIQVDRYIASEVCEDSITVGMVRHQGKIMYVGDVRSVTQKHIQEWGPFDLVIGGSPCNDLSIVNPARKGLYEGTGRLFFEFYRLLHDARPKEGDDRPFFWLFENVVAMGVSDKRDISRFLESNPVMIDAKEVSAAHRARYFWGNLPGMNRPLASTVNDKLELQECLEHGRIAKFSKVRTITTRSNSIKQGKDQHFPVFMNEKEDILWCTEMERVFGFPVHYTDVSNMSRLARQRLLGRSWSVPVIRHLFAPLKEYFACVGGPSSGAPPPSGGSPAGSPTSTEEGTSESATPESGPGTSTEPSEGSAPGSPAGSPTSTEEGTSTEPSEGSAPGTSTEPSEPKKKRKVMDKKYSIGLAIGTNSVGWAVITDEYKVPSKKFKVLGNTDRHSIKKNLIGALLFDSGETAEATRLKRTARRRYTRRKNRICYLQEIFSNEMAKVDDSFFHRLEESFLVEEDKKHERHPIFGNIVDEVAYHEKYPTIYHLRKKLVDSTDKADLRLIYLALAHMIKFRGHFLIEGDLNPDNSDVDKLFIQLVQTYNQLFEENPINASGVDAKAILSARLSKSRRLENLIAQLPGEKKNGLFGNLIALSLGLTPNFKSNFDLAEDAKLQLSKDTYDDDLDNLLAQIGDQYADLFLAAKNLSDAILLSDILRVNTEITKAPLSASMIKRYDEHHQDLTLLKALVRQQLPEKYKEIFFDQSKNGYAGYIDGGASQEEFYKFIKPILEKMDGTEELLVKLNREDLLRKQRTFDNGSIPHQIHLGELHAILRRQEDFYPFLKDNREKIEKILTFRIPYYVGPLARGNSRFAWMTRKSEETITPWNFEEVVDKGASAQSFIERMTNFDKNLPNEKVLPKHSLLYEYFTVYNELTKVKYVTEGMRKPAFLSGEQKKAIVDLLFKTNRKVTVKQLKEDYFKKIECFDSVEISGVEDRFNASLGTYHDLLKIIKDKDFLDNEENEDILEDIVLTLTLFEDREMIEERLKTYAHLFDDKVMKQLKRRRYTGWGRLSRKLINGIRDKQSGKTILDFLKSDGFANRNFMQLIHDDSLTFKEDIQKAQVSGQGDSLHEHIANLAGSPAIKKGILQTVKVVDELVKVMGRHKPENIVIEMARENQTTQKGQKNSRERMKRIEEGIKELGSQILKEHPVENTQLQNEKLYLYYLQNGRDMYVDQELDINRLSDYDVDAIVPQSFLKDDSIDNKVLTRSDKNRGKSDNVPSEEVVKKMKNYWRQLLNAKLITQRKFDNLTKAERGGLSELDKAGFIKRQLVETRQITKHVAQILDSRMNTKYDENDKLIREVKVITLKSKLVSDFRKDFQFYKVREINNYHHAHDAYLNAVVGTALIKKYPKLESEFVYGDYKVYDVRKMIAKSEQEIGKATAKYFFYSNIMNFFKTEITLANGEIRKRPLIETNGETGEIVWDKGRDFATVRKVLSMPQVNIVKKTEVQTGGFSKESILPKRNSDKLIARKKDWDPKKYGGFDSPTVAYSVLVVAKVEKGKSKKLKSVKELLGITIMERSSFEKNPIDFLEAKGYKEVKKDLIIKLPKYSLFELENGRKRMLASAGELQKGNELALPSKYVNFLYLASHYEKLKGSPEDNEQKQLFVEQHKHYLDEIIEQISEFSKRVILADANLDKVLSAYNKHRDKPIREQAENIIHLFTLTNLGAPAAFKYFDTTIDRKRYTSTKEVLDATLIHQSITGLYETRIDLSQLGGDAYPYDVPDYASLGSGSPKKKRKVEDPKKKRKVDGSGSETPGTSESATPESRTLAKTVAYFYDPDVGNFHYGAGHPMKPHRLALTHSLVLHYGLYKKMIVFKPYQASQHDMCRFHSEDYIDFLQRVSPTNMQGFTKSLNAFNVGDDCPVFPGLFEFCSRYTGASLQGATQLNNKICDIAINWAGGLHHAKKFEASGFCYVNDIVIGILELLKYHPRVLYIDIDIHHGDGVQEAFYLTDRVMTVSFHKYGNYFFPGTGDMYEVGAESGRYYCLNVPLRDGIDDQSYKHLFQPVINQVVDFYQPTCIVLQCGADSLGCDRLGCFNLSIRGHGECVEYVKSFNIPLLVLGGGGYTVRNVARCWTYETSLLVEEAISEELPYSEYFEYFAPDFTLHPDVSTRIENQNSRQYLDQIRQTIFENLKMLNHAPSVQIHDVPADLLTYDRTDEADAEERGPEENYSRPEAPNEFYDGDHDNDKESDVEIEGSGATNFSLLKQAGDVEENPGPMHX

SEQ ID NO: 112 - protein, 2575 aa, synthetic construct
  REGION 1..2575: note = V61 fusion
  SITE 2575: note = misc_feature - Xaa =
MPAAKRVKLDGSNHDQEFDPPKVYPPVPAEKRKPIRVLSLFDGIATGLLVLKDLGIQVDRYIASEVCEDSITVGMVRHQGKIMYVGDVRSVTQKHIQEWGPFDLVIGGSPCNDLSIVNPARKGLYEGTGRLFFEFYRLLHDARPKEGDDRPFFWLFENVVAMGVSDKRDISRFLESNPVMIDAKEVSAAHRARYFWGNLPGMNRPLASTVNDKLELQECLEHGRIAKFSKVRTITTRSNSIKQGKDQHFPVFMNEKEDILWCTEMERVFGFPVHYTDVSNMSRLARQRLLGRSWSVPVIRHLFAPLKEYFACVSSGNSNANSRGPSFSSGLVPLSLRGSHMGPMEIYKTVSAWKRQPVRVLSLFRNIDKVLKSLGFLESGSGSGGGTLKYVEDVTNVVRRDVEKWGPFDLVYGSTQPLGSSCDRCPGWYMFQFHRILQYALPRQESQRPFFWIFMDNLLLTEDDQETTTRFLQTEAVTLQDVRGRDYQNAMRVWSNIPGLKSKHAPLTPKEEEYLQAQVRSRSKLDAPKVDLLVKNCLLPLREYFKYFSQNSLPLGGPSSGAPPPSGGSPAGSPTSTEEGTSESATPESGPGTSTEPSEGSAPGSPAGSPTSTEEGTSTEPSEGSAPGTSTEPSEPKKKRKVMDKKYSIGLAIGTNSVGWAVITDEYKVPSKKFKVLGNTDRHSIKKNLIGALLFDSGETAEATRLKRTARRRYTRRKNRICYLQEIFSNEMAKVDDSFFHRLEESFLVEEDKKHERHPIFGNIVDEVAYHEKYPTIYHLRKKLVDSTDKADLRLIYLALAHMIKFRGHFLIEGDLNPDNSDVDKLFIQLVQTYNQLFEENPINASGVDAKAILSARLSKSRRLENLIAQLPGEKKNGLFGNLIALSLGLTPNFKSNFDLAEDAKLQLSKDTYDDDLDNLLAQIGDQYADLFLAAKNLSDAILLSDILRVNTEITKAPLSASMIKRYDEHHQDLTLLKALVRQQLPEKYKEIFFDQSKNGYAGYIDGGASQEEFYKFIKPILEKMDGTEELLVKLNREDLLRKQRTFDNGSIPHQIHLGELHAILRRQEDFYPFLKDNREKIEKILTFRIPYYVGPLARGNSRFAWMTRKSEETITPWNFEEVVDKGASAQSFIERMTNFDKNLPNEKVLPKHSLLYEYFTVYNELTKVKYVTEGMRKPAFLSGEQKKAIVDLLFKTNRKVTVKQLKEDYFKKIECFDSVEISGVEDRFNASLGTYHDLLKIIKDKDFLDNEENEDILEDIVLTLTLFEDREMIEERLKTYAHLFDDKVMKQLKRRRYTGWGRLSRKLINGIRDKQSGKTILDFLKSDGFANRNFMQLIHDDSLTFKEDIQKAQVSGQGDSLHEHIANLAGSPAIKKGILQTVKVVDELVKVMGRHKPENIVIEMARENQTTQKGQKNSRERMKRIEEGIKELGSQILKEHPVENTQLQNEKLYLYYLQNGRDMYVDQELDINRLSDYDVDAIVPQSFLKDDSIDNKVLTRSDKNRGKSDNVPSEEVVKKMKNYWRQLLNAKLITQRKFDNLTKAERGGLSELDKAGFIKRQLVETRQITKHVAQILDSRMNTKYDENDKLIREVKVITLKSKLVSDFRKDFQFYKVREINNYHHAHDAYLNAVVGTALIKKYPKLESEFVYGDYKVYDVRKMIAKSEQEIGKATAKYFFYSNIMNFFKTEITLANGEIRKRPLIETNGETGEIVWDKGRDFATVRKVLSMPQVNIVKKTEVQTGGFSKESILPKRNSDKLIARKKDWDPKKYGGFDSPTVAYSVLVVAKVEKGKSKKLKSVKELLGITIMERSSFEKNPIDFLEAKGYKEVKKDLIIKLPKYSLFELENGRKRMLASAGELQKGNELALPSKYVNFLYLASHYEKLKGSPEDNEQKQLFVEQHKHYLDEIIEQISEFSKRVILADANLDKVLSAYNKHRDKPIREQAENIIHLFTLTNLGAPAAFKYFDTTIDRKRYTSTKEVLDATLIHQSITGLYETRIDLSQLGGDAYPYDVPDYASLGSGSPKKKRKVEDPKKKRKVDGSGSETPGTSESATPESMDQMPNLFRGSKACIHFIRSSVDDVLSMTASYIVSAVIPSMQHPTHIRGRTQKQLWTTSLVDHSVTSICHSYLGTKWVYIACWILDRRFNEWHLQKEGAKEFAAALTAERIKTPPKRPGGRRRGRLPNNSSRPSTPTISVLESKDTDSDREAGTETGGENNDKEEEEKKDETSSSSEANSRCQTPIKMKPNIEPPENVEWSGAEASMFRVLIGTYYDNFCAIARLIGTKTCRQVYEFRVKESSIIAPVPTEDVDTPPRKKKRKHRLWAAHCRKIQLKKDGSSNHVYNYQPCDHPRQPCDSSCPCVIAQNFCEKFCQCSSECQNRFPGCRCKAQCNTKQCPCYLAVRECDPDLCLTCGAADHWDSKNVSCKNCSIQRGSKKHLLLAPSDVAGWGIFIKDPVQKNEFISEYCGEIISQDEADRRGKVYDKYMCSFLFNLNNDFVVDATRKGNKIRFANHSVNPNCYAKVMMVNGDHRIGIFAKRAIQTGEELFFDYRYSQADALKYVGIEREMEIPX

SEQ ID NO: 113 - protein, 2834 aa, synthetic construct
  REGION 1..2834: note = V62 fusion
  SITE 2834: note = misc_feature - Xaa =
MPAAKRVKLDGSNHDQEFDPPKVYPPVPAEKRKPIRVLSLFDGIATGLLVLKDLGIQVDRYIASEVCEDSITVGMVRHQGKIMYVGDVRSVTQKHIQEWGPFDLVIGGSPCNDLSIVNPARKGLYEGTGRLFFEFYRLLHDARPKEGDDRPFFWLFENVVAMGVSDKRDISRFLESNPVMIDAKEVSAAHRARYFWGNLPGMNRPLASTVNDKLELQECLEHGRIAKFSKVRTITTRSNSIKQGKDQHFPVFMNEKEDILWCTEMERVFGFPVHYTDVSNMSRLARQRLLGRSWSVPVIRHLFAPLKEYFACVSSGNSNANSRGPSFSSGLVPLSLRGSHMGPMEIYKTVSAWKRQPVRVLSLFRNIDKVLKSLGFLESGSGSGGGTLKYVEDVTNVVRRDVEKWGPFDLVYGSTQPLGSSCDRCPGWYMFQFHRILQYALPRQESQRPFFWIFMDNLLLTEDDQETTTRFLQTEAVTLQDVRGRDYQNAMRVWSNIPGLKSKHAPLTPKEEEYLQAQVRSRSKLDAPKVDLLVKNCLLPLREYFKYFSQNSLPLGGPSSGAPPPSGGSPAGSPTSTEEGTSESATPESGPGTSTEPSEGSAPGSPAGSPTSTEEGTSTEPSEGSAPGTSTEPSEPKKKRKVMDKKYSIGLAIGTNSVGWAVITDEYKVPSKKFKVLGNTDRHSIKKNLIGALLFDSGETAEATRLKRTARRRYTRRKNRICYLQEIFSNEMAKVDDSFFHRLEESFLVEEDKKHERHPIFGNIVDEVAYHEKYPTIYHLRKKLVDSTDKADLRLIYLALAHMIKFRGHFLIEGDLNPDNSDVDKLFIQLVQTYNQLFEENPINASGVDAKAILSARLSKSRRLENLIAQLPGEKKNGLFGNLIALSLGLTPNFKSNFDLAEDAKLQLSKDTYDDDLDNLLAQIGDQYADLFLAAKNLSDAILLSDILRVNTEITKAPLSASMIKRYDEHHQDLTLLKALVRQQLPEKYKEIFFDQSKNGYAGYIDGGASQEEFYKFIKPILEKMDGTEELLVKLNREDLLRKQRTFDNGSIPHQIHLGELHAILRRQEDFYPFLKDNREKIEKILTFRIPYYVGPLARGNSRFAWMTRKSEETITPWNFEEVVDKGASAQSFIERMTNFDKNLPNEKVLPKHSLLYEYFTVYNELTKVKYVTEGMRKPAFLSGEQKKAIVDLLFKTNRKVTVKQLKEDYFKKIECFDSVEISGVEDRFNASLGTYHDLLKIIKDKDFLDNEENEDILEDIVLTLTLFEDREMIEERLKTYAHLFDDKVMKQLKRRRYTGWGRLSRKLINGIRDKQSGKTILDFLKSDGFANRNFMQLIHDDSLTFKEDIQKAQVSGQGDSLHEHIANLAGSPAIKKGILQTVKVVDELVKVMGRHKPENIVIEMARENQTTQKGQKNSRERMKRIEEGIKELGSQILKEHPVENTQLQNEKLYLYYLQNGRDMYVDQELDINRLSDYDVDAIVPQSFLKDDSIDNKVLTRSDKNRGKSDNVPSEEVVKKMKNYWRQLLNAKLITQRKFDNLTKAERGGLSELDKAGFIKRQLVETRQITKHVAQILDSRMNTKYDENDKLIREVKVITLKSKLVSDFRKDFQFYKVREINNYHHAHDAYLNAVVGTALIKKYPKLESEFVYGDYKVYDVRKMIAKSEQEIGKATAKYFFYSNIMNFFKTEITLANGEIRKRPLIETNGETGEIVWDKGRDFATVRKVLSMPQVNIVKKTEVQTGGFSKESILPKRNSDKLIARKKDWDPKKYGGFDSPTVAYSVLVVAKVEKGKSKKLKSVKELLGITIMERSSFEKNPIDFLEAKGYKEVKKDLIIKLPKYSLFELENGRKRMLASAGELQKGNELALPSKYVNFLYLASHYEKLKGSPEDNEQKQLFVEQHKHYLDEIIEQISEFSKRVILADANLDKVLSAYNKHRDKPIREQAENIIHLFTLTNLGAPAAFKYFDTTIDRKRYTSTKEVLDATLIHQSITGLYETRIDLSQLGGDAYPYDVPDYASLGSGSPKKKRKVEDPKKKRKVDGSGSETPGTSESATPESRTLGQTGKKSEKGPVCWRKRVKSEYMRLRQLKRFRRADEVKSMFSSNRQKILERTEILNQEWKQRRIQPVHILTSVSSLRGTRECSVTSDLDFPTQVIPLKTLNAVASVPIMYSWSPLQQNFMVEDETVLHNIPYMGDEVLDQDGTFIEELIKNYDGKVHGDRECGFINDEIFVELVNALGQYNDDDDDDDGDDPEEREEKQKDLEDHRDDKESRPPRKFPSDKIFEAISSMFPDKGTAEELKEKYKELTEQQLPGALPPECTPNIDGPNAKSVQREQSLHSFHTLFCRRCFKYDCFLHPFHATPNTYKRKNTETALDNKPCGPQCYQHLEGAKEFAAALTAERIKTPPKRPGGRRRGRLPNNSSRPSTPTINVLESKDTDSDREAGTETGGENNDKEEEEKKDETSSSSEANSRCQTPIKMKPNIEPPENVEWSGAEASMFRVLIGTYYDNFCAIARLIGTKTCRQVYEFRVKESSIIAPAPAEDVDTPPRKKKRKHRLWAAHCRKIQLKKDGSSNHVYNYQPCDHPRQPCDSSCPCVIAQNFCEKFCQCSSECQNRFPGCRCKAQCNTKQCPCYLAVRECDPDLCLTCGAADHWDSKNVSCKNCSIQRGSKKHLLLAPSDVAGWGIFIKDPVQKNEFISEYCGEIISQDEADRRGKVYDKYMCSFLFNLNNDFVVDATRKGNKIRFANHSVNPNCYAKVMMVNGDHRIGIFAKRAIQTGEELFFDYRYSQADALKYVGIEREMEIPEGSGATNFSLLKQAGDVEENPGPMHX

SEQ ID NO: 114 - protein, 2353 aa, synthetic construct
  REGION 1..2353: note = V63 fusion
  SITE 2353: note = misc_feature - Xaa =
MPAAKRVKLDGSNHDQEFDPPKVYPPVPAEKRKPIRVLSLFDGIATGLLVLKDLGIQVDRYIASEVCEDSITVGMVRHQGKIMYVGDVRSVTQKHIQEWGPFDLVIGGSPCNDLSIVNPARKGLYEGTGRLFFEFYRLLHDARPKEGDDRPFFWLFENVVAMGVSDKRDISRFLESNPVMIDAKEVSAAHRARYFWGNLPGMNRPLASTVNDKLELQECLEHGRIAKFSKVRTITTRSNSIKQGKDQHFPVFMNEKEDILWCTEMERVFGFPVHYTDVSNMSRLARQRLLGRSWSVPVIRHLFAPLKEYFACVSSGNSNANSRGPSFSSGLVPLSLRGSHMGPMEIYKTVSAWKRQPVRVLSLFRNIDKVLKSLGFLESGSGSGGGTLKYVEDVTNVVRRDVEKWGPFDLVYGSTQPLGSSCDRCPGWYMFQFHRILQYALPRQESQRPFFWIFMDNLLLTEDDQETTTRFLQTEAVTLQDVRGRDYQNAMRVWSNIPGLKSKHAPLTPKEEEYLQAQVRSRSKLDAPKVDLLVKNCLLPLREYFKYFSQNSLPLGGPSSGAPPPSGGSPAGSPTSTEEGTSESATPESGPGTSTEPSEGSAPGSPAGSPTSTEEGTSTEPSEGSAPGTSTEPSEPKKKRKVMDKKYSIGLAIGTNSVGWAVITDEYKVPSKKFKVLGNTDRHSIKKNLIGALLFDSGETAEATRLKRTARRRYTRRKNRICYLQEIFSNEMAKVDDSFFHRLEESFLVEEDKKHERHPIFGNIVDEVAYHEKYPTIYHLRKKLVDSTDKADLRLIYLALAHMIKFRGHFLIEGDLNPDNSDVDKLFIQLVQTYNQLFEENPINASGVDAKAILSARLSKSRRLENLIAQLPGEKKNGLFGNLIALSLGLTPNFKSNFDLAEDAKLQLSKDTYDDDLDNLLAQIGDQYADLFLAAKNLSDAILLSDILRVNTEITKAPLSASMIKRYDEHHQDLTLLKALVRQQLPEKYKEIFFDQSKNGYAGYIDGGASQEEFYKFIKPILEKMDGTEELLVKLNREDLLRKQRTFDNGSIPHQIHLGELHAILRRQEDFYPFLKDNREKIEKILTFRIPYYVGPLARGNSRFAWMTRKSEETITPWNFEEVVDKGASAQSFIERMTNFDKNLPNEKVLPKHSLLYEYFTVYNELTKVKYVTEGMRKPAFLSGEQKKAIVDLLFKTNRKVTVKQLKEDYFKKIECFDSVEISGVEDRFNASLGTYHDLLKIIKDKDFLDNEENEDILEDIVLTLTLFEDREMIEERLKTYAHLFDDKVMKQLKRRRYTGWGRLSRKLINGIRDKQSGKTILDFLKSDGFANRNFMQLIHDDSLTFKEDIQKAQVSGQGDSLHEHIANLAGSPAIKKGILQTVKVVDELVKVMGRHKPENIVIEMARENQTTQKGQKNSRERMKRIEEGIKELGSQILKEHPVENTQLQNEKLYLYYLQNGRDMYVDQELDINRLSDYDVDAIVPQSFLKDDSIDNKVLTRSDKNRGKSDNVPSEEVVKKMKNYWRQLLNAKLITQRKFDNLTKAERGGLSELDKAGFIKRQLVETRQITKHVAQILDSRMNTKYDENDKLIREVKVITLKSKLVSDFRKDFQFYKVREINNYHHAHDAYLNAVVGTALIKKYPKLESEFVYGDYKVYDVRKMIAKSEQEIGKATAKYFFYSNIMNFFKTEITLANGEIRKRPLIETNGETGEIVWDKGRDFATVRKVLSMPQVNIVKKTEVQTGGFSKESILPKRNSDKLIARKKDWDPKKYGGFDSPTVAYSVLVVAKVEKGKSKKLKSVKELLGITIMERSSFEKNPIDFLEAKGYKEVKKDLIIKLPKYSLFELENGRKRMLASAGELQKGNELALPSKYVNFLYLASHYEKLKGSPEDNEQKQLFVEQHKHYLDEIIEQISEFSKRVILADANLDKVLSAYNKHRDKPIREQAENIIHLFTLTNLGAPAAFKYFDTTIDRKRYTSTKEVLDATLIHQSITGLYETRIDLSQLGGDAYPYDVPDYASLGSGSPKKKRKVEDPKKKRKVDGSGSETPGTSESATPESRTLEDVDTPPRKKKRKHRLWAAHCRKIQLKKDGSSNHVYNYQPCDHPRQPCDSSCPCVIAQNFCEKFCQCSSECQNRFPGCRCKAQCNTKQCPCYLAVRECDPDLCLTCGAADHWDSKNVSCKNCSIQRGSKKHLLLAPSDVAGWGIFIKDPVQKNEFISEYCGEIISQDEADRRGKVYDKYMCSFLFNLNNDFVVDATRKGNKIRFANHSVNPNCYAKVMMVNGDHRIGIFAKRAIQTGEELFFDYRYSQADALKYVGIEREMEIPEGSGATNFSLLKQAGDVEENPGPMHX

SEQ ID NO: 115 - protein, 2516 aa, synthetic construct
  REGION 1..2516: note = V64 fusion
  SITE 2516: note = misc_feature - Xaa =
MPAAKRVKLDGSNHDQEFDPPKVYPPVPAEKRKPIRVLSLFDGIATGLLVLKDLGIQVDRYIASEVCEDSITVGMVRHQGKIMYVGDVRSVTQKHIQEWGPFDLVIGGSPCNDLSIVNPARKGLYEGTGRLFFEFYRLLHDARPKEGDDRPFFWLFENVVAMGVSDKRDISRFLESNPVMIDAKEVSAAHRARYFWGNLPGMNRPLASTVNDKLELQECLEHGRIAKFSKVRTITTRSNSIKQGKDQHFPVFMNEKEDILWCTEMERVFGFPVHYTDVSNMSRLARQRLLGRSWSVPVIRHLFAPLKEYFACVSSGNSNANSRGPSFSSGLVPLSLRGSHMGPMEIYKTVSAWKRQPVRVLSLFRNIDKVLKSLGFLESGSGSGGGTLKYVEDVTNVVRRDVEKWGPFDLVYGSTQPLGSSCDRCPGWYMFQFHRILQYALPRQESQRPFFWIFMDNLLLTEDDQETTTRFLQTEAVTLQDVRGRDYQNAMRVWSNIPGLKSKHAPLTPKEEEYLQAQVRSRSKLDAPKVDLLVKNCLLPLREYFKYFSQNSLPLGGPSSGAPPPSGGSPAGSPTSTEEGTSESATPESGPGTSTEPSEGSAPGSPAGSPTSTEEGTSTEPSEGSAPGTSTEPSEPKKKRKVMDKKYSIGLAIGTNSVGWAVITDEYKVPSKKFKVLGNTDRHSIKKNLIGALLFDSGETAEATRLKRTARRRYTRRKNRICYLQEIFSNEMAKVDDSFFHRLEESFLVEEDKKHERHPIFGNIVDEVAYHEKYPTIYHLRKKLVDSTDKADLRLIYLALAHMIKFRGHFLIEGDLNPDNSDVDKLFIQLVQTYNQLFEENPINASGVDAKAILSARLSKSRRLENLIAQLPGEKKNGLFGNLIALSLGLTPNFKSNFDLAEDAKLQLSKDTYDDDLDNLLAQIGDQYADLFLAAKNLSDAILLSDILRVNTEITKAPLSASMIKRYDEHHQDLTLLKALVRQQLPEKYKEIFFDQSKNGYAGYIDGGASQEEFYKFIKPILEKMDGTEELLVKLNREDLLRKQRTFDNGSIPHQIHLGELHAILRRQEDFYPFLKDNREKIEKILTFRIPYYVGPLARGNSRFAWMTRKSEETITPWNFEEVVDKGASAQSFIERMTNFDKNLPNEKVLPKHSLLYEYFTVYNELTKVKYVTEGMRKPAFLSGEQKKAIVDLLFKTNRKVTVKQLKEDYFKKIECFDSVEISGVEDRFNASLGTYHDLLKIIKDKDFLDNEENEDILEDIVLTLTLFEDREMIEERLKTYAHLFDDKVMKQLKRRRYTGWGRLSRKLINGIRDKQSGKTILDFLKSDGFANRNFMQLIHDDSLTFKEDIQKAQVSGQGDSLHEHIANLAGSPAIKKGILQTVKVVDELVKVMGRHKPENIVIEMARENQTTQKGQKNSRERMKRIEEGIKELGSQILKEHPVENTQLQNEKLYLYYLQNGRDMYVDQELDINRLSDYDVDAIVPQSFLKDDSIDNKVLTRSDKNRGKSDNVPSEEVVKKMKNYWRQLLNAKLITQRKFDNLTKAERGGLSELDKAGFIKRQLVETRQITKHVAQILDSRMNTKYDENDKLIREVKVITLKSKLVSDFRKDFQFYKVREINNYHHAHDAYLNAVVGTALIKKYPKLESEFVYGDYKVYDVRKMIAKSEQEIGKATAKYFFYSNIMNFFKTEITLANGEIRKRPLIETNGETGEIVWDKGRDFATVRKVLSMPQVNIVKKTEVQTGGFSKESILPKRNSDKLIARKKDWDPKKYGGFDSPTVAYSVLVVAKVEKGKSKKLKSVKELLGITIMERSSFEKNPIDFLEAKGYKEVKKDLIIKLPKYSLFELENGRKRMLASAGELQKGNELALPSKYVNFLYLASHYEKLKGSPEDNEQKQLFVEQHKHYLDEIIEQISEFSKRVILADANLDKVLSAYNKHRDKPIREQAENIIHLFTLTNLGAPAAFKYFDTTIDRKRYTSTKEVLDATLIHQSITGLYETRIDLSQLGGDAYPYDVPDYASLGSGSPKKKRKVEDPKKKRKVDGSGSETPGTSESATPESRTLAKTVAYFYDPDVGNFHYGAGHPMKPHRLALTHSLVLHYGLYKKMIVFKPYQASQHDMCRFHSEDYIDFLQRVSPTNMQGFTKSLNAFNVGDDCPVFPGLFEFCSRYTGASLQGATQLNNKICDIAINWAGGLHHAKKFEASGFCYVNDIVIGILELLKYHPRVLYIDIDIHHGDGVQEAFYLTDRVMTVSFHKYGNYFFPGTGDMYEVGAESGRYYCLNVPLRDGIDDQSYKHLFQPVINQVVDFYQPTCIVLQCGADSLGCDRLGCFNLSIRGHGECVEYVKSFNIPLLVLGGGGYTVRNVARCWTYETSLLVEEAISEELPYSEYFEYFAPDFTLHPDVSTRIENQNSRQYLDQIRQTIFENLKMLNHAPSVQIHDVPADLLTYDRTDEADAEERGPEENYSRPEAPNEFYDGDHDNDKESDVEIEGSGATNFSLLKQAGDVEENPGPMHX

SEQ ID NO: 116 - protein, 2404 aa, synthetic construct
  REGION 1..2404: note = V65 fusion
  SITE 2404: note = misc_feature - Xaa =
MPAAKRVKLDGSNHDQEFDPPKVYPPVPAEKRKPIRVLSLFDGIATGLLVLKDLGIQVDRYIASEVCEDSITVGMVRHQGKIMYVGDVRSVTQKHIQEWGPFDLVIGGSPCNDLSIVNPARKGLYEGTGRLFFEFYRLLHDARPKEGDDRPFFWLFENVVAMGVSDKRDISRFLESNPVMIDAKEVSAAHRARYFWGNLPGMNRPLASTVNDKLELQECLEHGRIAKFSKVRTITTRSNSIKQGKDQHFPVFMNEKEDILWCTEMERVFGFPVHYTDVSNMSRLARQRLLGRSWSVPVIRHLFAPLKEYFACVSSGNSNANSRGPSFSSGLVPLSLRGSHMGPMEIYKTVSAWKRQPVRVLSLFRNIDKVLKSLGFLESGSGSGGGTLKYVEDVTNVVRRDVEKWGPFDLVYGSTQPLGSSCDRCPGWYMFQFHRILQYALPRQESQRPFFWIFMDNLLLTEDDQETTTRFLQTEAVTLQDVRGRDYQNAMRVWSNIPGLKSKHAPLTPKEEEYLQAQVRSRSKLDAPKVDLLVKNCLLPLREYFKYFSQNSLPLGGPSSGAPPPSGGSPAGSPTSTEEGTSESATPESGPGTSTEPSEGSAPGSPAGSPTSTEEGTSTEPSEGSAPGTSTEPSEPKKKRKVMDKKYSIGLAIGTNSVGWAVITDEYKVPSKKFKVLGNTDRHSIKKNLIGALLFDSGETAEATRLKRTARRRYTRRKNRICYLQEIFSNEMAKVDDSFFHRLEESFLVEEDKKHERHPIFGNIVDEVAYHEKYPTIYHLRKKLVDSTDKADLRLIYLALAHMIKFRGHFLIEGDLNPDNSDVDKLFIQLVQTYNQLFEENPINASGVDAKAILSARLSKSRRLENLIAQLPGEKKNGLFGNLIALSLGLTPNFKSNFDLAEDAKLQLSKDTYDDDLDNLLAQIGDQYADLFLAAKNLSDAILLSDILRVNTEITKAPLSASMIKRYDEHHQDLTLLKALVRQQLPEKYKEIFFDQSKNGYAGYIDGGASQEEFYKFIKPILEKMDGTEELLVKLNREDLLRKQRTFDNGSIPHQIHLGELHAILRRQEDFYPFLKDNREKIEKILTFRIPYYVGPLARGNSRFAWMTRKSEETITPWNFEEVVDKGASAQSFIERMTNFDKNLPNEKVLPKHSLLYEYFTVYNELTKVKYVTEGMRKPAFLSGEQKKAIVDLLFKTNRKVTVKQLKEDYFKKIECFDSVEISGVEDRFNASLGTYHDLLKIIKDKDFLDNEENEDILEDIVLTLTLFEDREMIEERLKTYAHLFDDKVMKQLKRRRYTGWGRLSRKLINGIRDKQSGKTILDFLKSDGFANRNFMQLIHDDSLTFKEDIQKAQVSGQGDSLHEHIANLAGSPAIKKGILQTVKVVDELVKVMGRHKPENIVIEMARENQTTQKGQKNSRERMKRIEEGIKELGSQILKEHPVENTQLQNEKLYLYYLQNGRDMYVDQELDINRLSDYDVDAIVPQSFLKDDSIDNKVLTRSDKNRGKSDNVPSEEVVKKMKNYWRQLLNAKLITQRKFDNLTKAERGGLSELDKAGFIKRQLVETRQITKHVAQILDSRMNTKYDENDKLIREVKVITLKSKLVSDFRKDFQFYKVREINNYHHAHDAYLNAVVGTALIKKYPKLESEFVYGDYKVYDVRKMIAKSEQEIGKATAKYFFYSNIMNFFKTEITLANGEIRKRPLIETNGETGEIVWDKGRDFATVRKVLSMPQVNIVKKTEVQTGGFSKESILPKRNSDKLIARKKDWDPKKYGGFDSPTVAYSVLVVAKVEKGKSKKLKSVKELLGITIMERSSFEKNPIDFLEAKGYKEVKKDLIIKLPKYSLFELENGRKRMLASAGELQKGNELALPSKYVNFLYLASHYEKLKGSPEDNEQKQLFVEQHKHYLDEIIEQISEFSKRVILADANLDKVLSAYNKHRDKPIREQAENIIHLFTLTNLGAPAAFKYFDTTIDRKRYTSTKEVLDATLIHQSITGLYETRIDLSQLGGDAYPYDVPDYASLGSGSPKKKRKVEDPKKKRKVDGSGSETPGTSESATPESRTLAKTVAYFYDPDVGNFHYGAGHPMKPHRLALTHSLVLHYGLYKKMIVFKPYQASQHDMCRFHSEDYIDFLQRVSPTNMQGFTKSLNAFNVGDDCPVFPGLFEFCSRYTGASLQGATQLNNKICDIAINWAGGLHHAKKFEASGFCYVNDIVIGILELLKYHPRVLYIDIDIHHGDGVQEAFYLTDRVMTVSFHKYGNYFFPGTGDMYEVGAESGRYYCLNVPLRDGIDDQSYKHLFQPVINQVVDFYQPTCIVLQCGADSLGCDRLGCFNLSIRGHGECVEYVKSFNIPLLVLGGGGYTVRNVARCWTYETSLLVEEGSGATNFSLLKQAGDVEENPGPMHX

SEQ ID NO: 117 - protein, 2454 aa, synthetic construct
  REGION 1..2454: note = V66 fusion
  SITE 2454: note = misc_feature - Xaa =
MPAAKRVKLDGSNHDQEFDPPKVYPPVPAEKRKPIRVLSLFDGIATGLLVLKDLGIQVDRYIASEVCEDSITVGMVRHQGKIMYVGDVRSVTQKHIQEWGPFDLVIGGSPCNDLSIVNPARKGLYEGTGRLFFEFYRLLHDARPKEGDDRPFFWLFENVVAMGVSDKRDISRFLESNPVMIDAKEVSAAHRARYFWGNLPGMNRPLASTVNDKLELQECLEHGRIAKFSKVRTITTRSNSIKQGKDQHFPVFMNEKEDILWCTEMERVFGFPVHYTDVSNMSRLARQRLLGRSWSVPVIRHLFAPLKEYFACVSSGNSNANSRGPSFSSGLVPLSLRGSHMGPMEIYKTVSAWKRQPVRVLSLFRNIDKVLKSLGFLESGSGSGGGTLKYVEDVTNVVRRDVEKWGPFDLVYGSTQPLGSSCDRCPGWYMFQFHRILQYALPRQESQRPFFWIFMDNLLLTEDDQETTTRFLQTEAVTLQDVRGRDYQNAMRVWSNIPGLKSKHAPLTPKEEEYLQAQVRSRSKLDAPKVDLLVKNCLLPLREYFKYFSQNSLPLGGPSSGAPPPSGGSPAGSPTSTEEGTSESATPESGPGTSTEPSEGSAPGSPAGSPTSTEEGTSTEPSEGSAPGTSTEPSEPKKKRKVMDKKYSIGLAIGTNSVGWAVITDEYKVPSKKFKVLGNTDRHSIKKNLIGALLFDSGETAEATRLKRTARRRYTRRKNRICYLQEIFSNEMAKVDDSFFHRLEESFLVEEDKKHERHPIFGNIVDEVAYHEKYPTIYHLRKKLVDSTDKADLRLIYLALAHMIKFRGHFLIEGDLNPDNSDVDKLFIQLVQTYNQLFEENPINASGVDAKAILSARLSKSRRLENLIAQLPGEKKNGLFGNLIALSLGLTPNFKSNFDLAEDAKLQLSKDTYDDDLDNLLAQIGDQYADLFLAAKNLSDAILLSDILRVNTEITKAPLSASMIKRYDEHHQDLTLLKALVRQQLPEKYKEIFFDQSKNGYAGYIDGGASQEEFYKFIKPILEKMDGTEELLVKLNREDLLRKQRTFDNGSIPHQIHLGELHAILRRQEDFYPFLKDNREKIEKILTFRIPYYVGPLARGNSRFAWMTRKSEETITPWNFEEVVDKGASAQSFIERMTNFDKNLPNEKVLPKHSLLYEYFTVYNELTKVKYVTEGMRKPAFLSGEQKKAIVDLLFKTNRKVTVKQLKEDYFKKIECFDSVEISGVEDRFNASLGTYHDLLKIIKDKDFLDNEENEDILEDIVLTLTLFEDREMIEERLKTYAHLFDDKVMKQLKRRRYTGWGRLSRKLINGIRDKQSGKTILDFLKSDGFANRNFMQLIHDDSLTFKEDIQKAQVSGQGDSLHEHIANLAGSPAIKKGILQTVKVVDELVKVMGRHKPENIVIEMARENQTTQKGQKNSRERMKRIEEGIKELGSQILKEHPVENTQLQNEKLYLYYLQNGRDMYVDQELDINRLSDYDVDAIVPQSFLKDDSIDNKVLTRSDKNRGKSDNVPSEEVVKKMKNYWRQLLNAKLITQRKFDNLTKAERGGLSELDKAGFIKRQLVETRQITKHVAQILDSRMNTKYDENDKLIREVKVITLKSKLVSDFRKDFQFYKVREINNYHHAHDAYLNAVVGTALIKKYPKLESEFVYGDYKVYDVRKMIAKSEQEIGKATAKYFFYSNIMNFFKTEITLANGEIRKRPLIETNGETGEIVWDKGRDFATVRKVLSMPQVNIVKKTEVQTGGFSKESILPKRNSDKLIARKKDWDPKKYGGFDSPTVAYSVLVVAKVEKGKSKKLKSVKELLGITIMERSSFEKNPIDFLEAKGYKEVKKDLIIKLPKYSLFELENGRKRMLASAGELQKGNELALPSKYVNFLYLASHYEKLKGSPEDNEQKQLFVEQHKHYLDEIIEQISEFSKRVILADANLDKVLSAYNKHRDKPIREQAENIIHLFTLTNLGAPAAFKYFDTTIDRKRYTSTKEVLDATLIHQSITGLYETRIDLSQLGGDAYPYDVPDYASLGSGSPKKKRKVEDPKKKRKVDGSGSETPGTSESATPESRTLAKTVAYFYDPDVGNFHYGAGHPMKPHRLALTHSLVLHYGLYKKMIVFKPYQASQHDMCRFHSEDYIDFLQRVSPTNMQGFTKSLNAFNVGDDCPVFPGLFEFCSRYTGASLQGATQLNNKICDIAINWAGGLHHAKKFEASGFCYVNDIVIGILELLKYHPRVLYIDIDIHHGDGVQEAFYLTDRVMTVSFHKYGNYFFPGTGDMYEVGAESGRYYCLNVPLRDGIDDQSYKHLFQPVINQVVDFYQPTCIVLQCGADSLGCDRLGCFNLSIRGHGECVEYVKSFNIPLLVLGGGGYTVRNVARCWTYETSLLVEEAISEELPYSEYFEYFAPDFTLHPDVSTRIENQNSRQYLDQIRQTIFENLEGSGATNFSLLKQAGDVEENPGPMHX

SEQ ID NO: 118 - protein, 2386 aa, synthetic construct
  REGION 1..2386: note = V67 fusion
  SITE 2386: note = misc_feature - Xaa =
MPAAKRVKLDGSNHDQEFDPPKVYPPVPAEKRKPIRVLSLFDGIATGLLVLKDLGIQVDRYIASEVCEDSITVGMVRHQGKIMYVGDVRSVTQKHIQEWGPFDLVIGGSPCNDLSIVNPARKGLYEGTGRLFFEFYRLLHDARPKEGDDRPFFWLFENVVAMGVSDKRDISRFLESNPVMIDAKEVSAAHRARYFWGNLPGMNRPLASTVNDKLELQECLEHGRIAKFSKVRTITTRSNSIKQGKDQHFPVFMNEKEDILWCTEMERVFGFPVHYTDVSNMSRLARQRLLGRSWSVPVIRHLFAPLKEYFACVSSGNSNANSRGPSFSSGLVPLSLRGSHMGPMEIYKTVSAWKRQPVRVLSLFRNIDKVLKSLGFLESGSGSGGGTLKYVEDVTNVVRRDVEKWGPFDLVYGSTQPLGSSCDRCPGWYMFQFHRILQYALPRQESQRPFFWIFMDNLLLTEDDQETTTRFLQTEAVTLQDVRGRDYQNAMRVWSNIPGLKSKHAPLTPKEEEYLQAQVRSRSKLDAPKVDLLVKNCLLPLREYFKYFSQNSLPLGGPSSGAPPPSGGSPAGSPTSTEEGTSESATPESGPGTSTEPSEGSAPGSPAGSPTSTEEGTSTEPSEGSAPGTSTEPSEPKKKRKVMDKKYSIGLAIGTNSVGWAVITDEYKVPSKKFKVLGNTDRHSIKKNLIGALLFDSGETAEATRLKRTARRRYTRRKNRICYLQEIFSNEMAKVDDSFFHRLEESFLVEEDKKHERHPIFGNIVDEVAYHEKYPTIYHLRKKLVDSTDKADLRLIYLALAHMIKFRGHFLIEGDLNPDNSDVDKLFIQLVQTYNQLFEENPINASGVDAKAILSARLSKSRRLENLIAQLPGEKKNGLFGNLIALSLGLTPNFKSNFDLAEDAKLQLSKDTYDDDLDNLLAQIGDQYADLFLAAKNLSDAILLSDILRVNTEITKAPLSASMIKRYDEHHQDLTLLKALVRQQLPEKYKEIFFDQSKNGYAGYIDGGASQEEFYKFIKPILEKMDGTEELLVKLNREDLLRKQRTFDNGSIPHQIHLGELHAILRRQEDFYPFLKDNREKIEKILTFRIPYYVGPLARGNSRFAWMTRKSEETITPWNFEEVVDKGASAQSFIERMTNFDKNLPNEKVLPKHSLLYEYFTVYNELTKVKYVTEGMRKPAFLSGEQKKAIVDLLFKTNRKVTVKQLKEDYFKKIECFDSVEISGVEDRFNASLGTYHDLLKIIKDKDFLDNEENEDILEDIVLTLTLFEDREMIEERLKTYAHLFDDKVMKQLKRRRYTGWGRLSRKLINGIRDKQSGKTILDFLKSDGFANRNFMQLIHDDSLTFKEDIQKAQVSGQGDSLHEHIANLAGSPAIKKGILQTVKVVDELVKVMGRHKPENIVIEMARENQTTQKGQKNSRERMKRIEEGIKELGSQILKEHPVENTQLQNEKLYLYYLQNGRDMYVDQELDINRLSDYDVDAIVPQSFLKDDSIDNKVLTRSDKNRGKSDNVPSEEVVKKMKNYWRQLLNAKLITQRKFDNLTKAERGGLSELDKAGFIKRQLVETRQITKHVAQILDSRMNTKYDENDKLIREVKVITLKSKLVSDFRKDFQFYKVREINNYHHAHDAYLNAVVGTALIKKYPKLESEFVYGDYKVYDVRKMIAKSEQEIGKATAKYFFYSNIMNFFKTEITLANGEIRKRPLIETNGETGEIVWDKGRDFATVRKVLSMPQVNIVKKTEVQTGGFSKESILPKRNSDKLIARKKDWDPKKYGGFDSPTVAYSVLVVAKVEKGKSKKLKSVKELLGITIMERSSFEKNPIDFLEAKGYKEVKKDLIIKLPKYSLFELENGRKRMLASAGELQKGNELALPSKYVNFLYLASHYEKLKGSPEDNEQKQLFVEQHKHYLDEIIEQISEFSKRVILADANLDKVLSAYNKHRDKPIREQAENIIHLFTLTNLGAPAAFKYFDTTIDRKRYTSTKEVLDATLIHQSITGLYETRIDLSQLGGDAYPYDVPDYASLGSGSPKKKRKVEDPKKKRKVDGSGSETPGTSESATPESRTNRAIRTEKIICRDVARGYENVPIPCVNGVDGEPCPEDYKYISENCETSTMNIDRNITHLQHCTCVDDCSSSNCLCGQLSIRCWYDKDGRLLQEFNKIEPPLIFECNQACSCWRNCKNRVVQSGIKVRLQLYRTAKMGWGVRALQTIPQGTFICEYVGELISDAEADVREDDSYLFDLDNKDGEVYCIDARYYGNISRFINHLCDPNIIPVRVFMLHQDLRFPRIAFFSSRDIRTGEELGFDYGDRFWDIKSKYFTCQCGSEKCKHSAEAIALEQSRLARLDPHPELLPELGSLPPVNTEGSGATNFSLLKQAGDVEENPGPMHX

SEQ ID NO: 119 - protein, 2553 aa, synthetic construct
  REGION 1..2553: note = V68 fusion
  SITE 2553: note = misc_feature - Xaa =
MPAAKRVKLDGSTGPATMNHDQEFDPPKVYPPVPAEKRKPIRVLSLFDGIATGLLVLKDLGIQVDRYIASEVCEDSITVGMVRHQGKIMYVGDVRSVTQKHIQEWGPFDLVIGGSPCNDLSIVNPARKGLYEGTGRLFFEFYRLLHDARPKEGDDRPFFWLFENVVAMGVSDKRDISRFLESNPVMIDAKEVSAAHRARYFWGNLPGMNRPLASTVNDKLELQECLEHGRIAKFSKVRTITTRSNSIKQGKDQHFPVFMNEKEDILWCTEMERVFGFPVHYTDVSNMSRLARQRLLGRSWSVPVIRHLFAPLKEYFACVSSGNSNANSRGPSFSSGLVPLSLRGSHMGPMEIYKTVSAWKRQPVRVLSLFRNIDKVLKSLGFLESGSGSGGGTLKYVEDVTNVVRRDVEKWGPFDLVYGSTQPLGSSCDRCPGWYMFQFHRILQYALPRQESQRPFFWIFMDNLLLTEDDQETTTRFLQTEAVTLQDVRGRDYQNAMRVWSNIPGLKSKHAPLTPKEEEYLQAQVRSRSKLDAPKVDLLVKNCLLPLREYFKYFSQNSLPLGGPSSGAPPPSGGSPAGSPTSTEEGTSESATPESGPGTSTEPSEGSAPGSPAGSPTSTEEGTSTEPSEGSAPGTSTEPSEPKKKRKVMDKKYSIGLAIGTNSVGWAVITDEYKVPSKKFKVLGNTDRHSIKKNLIGALLFDSGETAEATRLKRTARRRYTRRKNRICYLQEIFSNEMAKVDDSFFHRLEESFLVEEDKKHERHPIFGNIVDEVAYHEKYPTIYHLRKKLVDSTDKADLRLIYLALAHMIKFRGHFLIEGDLNPDNSDVDKLFIQLVQTYNQLFEENPINASGVDAKAILSARLSKSRRLENLIAQLPGEKKNGLFGNLIALSLGLTPNFKSNFDLAEDAKLQLSKDTYDDDLDNLLAQIGDQYADLFLAAKNLSDAILLSDILRVNTEITKAPLSASMIKRYDEHHQDLTLLKALVRQQLPEKYKEIFFDQSKNGYAGYIDGGASQEEFYKFIKPILEKMDGTEELLVKLNREDLLRKQRTFDNGSIPHQIHLGELHAILRRQEDFYPFLKDNREKIEKILTFRIPYYVGPLARGNSRFAWMTRKSEETITPWNFEEVVDKGASAQSFIERMTNFDKNLPNEKVLPKHSLLYEYFTVYNELTKVKYVTEGMRKPAFLSGEQKKAIVDLLFKTNRKVTVKQLKEDYFKKIECFDSVEISGVEDRFNASLGTYHDLLKIIKDKDFLDNEENEDILEDIVLTLTLFEDREMIEERLKTYAHLFDDKVMKQLKRRRYTGWGRLSRKLINGIRDKQSGKTILDFLKSDGFANRNFMQLIHDDSLTFKEDIQKAQVSGQGDSLHEHIANLAGSPAIKKGILQTVKVVDELVKVMGRHKPENIVIEMARENQTTQKGQKNSRERMKRIEEGIKELGSQILKEHPVENTQLQNEKLYLYYLQNGRDMYVDQELDINRLSDYDVDAIVPQSFLKDDSIDNKVLTRSDKNRGKSDNVPSEEVVKKMKNYWRQLLNAKLITQRKFDNLTKAERGGLSELDKAGFIKRQLVETRQITKHVAQILDSRMNTKYDENDKLIREVKVITLKSKLVSDFRKDFQFYKVREINNYHHAHDAYLNAVVGTALIKKYPKLESEFVYGDYKVYDVRKMIAKSEQEIGKATAKYFFYSNIMNFFKTEITLANGEIRKRPLIETNGETGEIVWDKGRDFATVRKVLSMPQVNIVKKTEVQTGGFSKESILPKRNSDKLIARKKDWDPKKYGGFDSPTVAYSVLVVAKVEKGKSKKLKSVKELLGITIMERSSFEKNPIDFLEAKGYKEVKKDLIIKLPKYSLFELENGRKRMLASAGELQKGNELALPSKYVNFLYLASHYEKLKGSPEDNEQKQLFVEQHKHYLDEIIEQISEFSKRVILADANLDKVLSAYNKHRDKPIREQAENIIHLFTLTNLGAPAAFKYFDTTIDRKRYTSTKEVLDATLIHQSITGLYETRIDLSQLGGDAYPYDVPDYASLGSGSPKKKRKVEDPKKKRKVDGSGSETPGTSESATPESRTLEMAQTQGTRRKVCYYYDGDVGNYYYGQGHPMKPHRIRMTHNLLLNYGLYRKMEIYRPHKANAEEMTKYHSDDYIKFLRSIRPDNMSEYSKQMQRFNVGEDCPVFDGLFEFCQLSTGGSVASAVKLNKQQTDIAVNWAGGLHHAKKSEASGFCYVNDIVLAILELLKYHQRVLYIDIDIHHGDGVEEAFYTTDRVMTVSFHKYGEYFPGTGDLRDIGAGKGKYYAVNYPLRDGIDDESYEAIFKPVMSKVMEMFQPSAVVLQCGSDSLSGDRLGCFNLTIKGHAKCVEFVKSFNLPMLMLGGGGYTIRNVARCWTYETAVALDTEIPNELPYNDYFEYFGPDFKLHISPSNMTNQNTNEYLEKIKQRLFENLRMLPHAPGVQMQAIPEDAIPEESGDEDEDDPDKRISICSSDKRIACEEEFSDSEEEGEGGRKNSSNFKKAKRVKTEDEKEKDPEEKKEVTEEEKTKEEKPEAKGVKEEVKLAX

SEQ ID NO: 120 - protein, 2442 aa, synthetic construct
  REGION 1..2442: note = V69 fusion
  SITE 2442: note = misc_feature - Xaa =
MPAAKRVKLDGSTGPATMNHDQEFDPPKVYPPVPAEKRKPIRVLSLFDGIATGLLVLKDLGIQVDRYIASEVCEDSITVGMVRHQGKIMYVGDVRSVTQKHIQEWGPFDLVIGGSPCNDLSIVNPARKGLYEGTGRLFFEFYRLLHDARPKEGDDRPFFWLFENVVAMGVSDKRDISRFLESNPVMIDAKEVSAAHRARYFWGNLPGMNRPLASTVNDKLELQECLEHGRIAKFSKVRTITTRSNSIKQGKDQHFPVFMNEKEDILWCTEMERVFGFPVHYTDVSNMSRLARQRLLGRSWSVPVIRHLFAPLKEYFACVSSGNSNANSRGPSFSSGLVPLSLRGSHMGPMEIYKTVSAWKRQPVRVLSLFRNIDKVLKSLGFLESGSGSGGGTLKYVEDVTNVVRRDVEKWGPFDLVYGSTQPLGSSCDRCPGWYMFQFHRILQYALPRQESQRPFFWIFMDNLLLTEDDQETTTRFLQTEAVTLQDVRGRDYQNAMRVWSNIPGLKSKHAPLTPKEEEYLQAQVRSRSKLDAPKVDLLVKNCLLPLREYFKYFSQNSLPLGGPSSGAPPPSGGSPAGSPTSTEEGTSESATPESGPGTSTEPSEGSAPGSPAGSPTSTEEGTSTEPSEGSAPGTSTEPSEPKKKRKVMDKKYSIGLAIGTNSVGWAVITDEYKVPSKKFKVLGNTDRHSIKKNLIGALLFDSGETAEATRLKRTARRRYTRRKNRICYLQEIFSNEMAKVDDSFFHRLEESFLVEEDKKHERHPIFGNIVDEVAYHEKYPTIYHLRKKLVDSTDKADLRLIYLALAHMIKFRGHFLIEGDLNPDNSDVDKLFIQLVQTYNQLFEENPINASGVDAKAILSARLSKSRRLENLIAQLPGEKKNGLFGNLIALSLGLTPNFKSNFDLAEDAKLQLSKDTYDDDLDNLLAQIGDQYADLFLAAKNLSDAILLSDILRVNTEITKAPLSASMIKRYDEHHQDLTLLKALVRQQLPEKYKEIFFDQSKNGYAGYIDGGASQEEFYKFIKPILEKMDGTEELLVKLNREDLLRKQRTFDNGSIPHQIHLGELHAILRRQEDFYPFLKDNREKIEKILTFRIPYYVGPLARGNSRFAWMTRKSEETITPWNFEEVVDKGASAQSFIERMTNFDKNLPNEKVLPKHSLLYEYFTVYNELTKVKYVTEGMRKPAFLSGEQKKAIVDLLFKTNRKVTVKQLKEDYFKKIECFDSVEISGVEDRFNASLGTYHDLLKIIKDKDFLDNEENEDILEDIVLTLTLFEDREMIEERLKTYAHLFDDKVMKQLKRRRYTGWGRLSRKLINGIRDKQSGKTILDFLKSDGFANRNFMQLIHDDSLTFKEDIQKAQVSGQGDSLHEHIANLAGSPAIKKGILQTVKVVDELVKVMGRHKPENIVIEMARENQTTQKGQKNSRERMKRIEEGIKELGSQILKEHPVENTQLQNEKLYLYYLQNGRDMYVDQELDINRLSDYDVDAIVPQSFLKDDSIDNKVLTRSDKNRGKSDNVPSEEVVKKMKNYWRQLLNAKLITQRKFDNLTKAERGGLSELDKAGFIKRQLVETRQITKHVAQILDSRMNTKYDENDKLIREVKVITLKSKLVSDFRKDFQFYKVREINNYHHAHDAYLNAVVGTALIKKYPKLESEFVYGDYKVYDVRKMIAKSEQEIGKATAKYFFYSNIMNFFKTEITLANGEIRKRPLIETNGETGEIVWDKGRDFATVRKVLSMPQVNIVKKTEVQTGGFSKESILPKRNSDKLIARKKDWDPKKYGGFDSPTVAYSVLVVAKVEKGKSKKLKSVKELLGITIMERSSFEKNPIDFLEAKGYKEVKKDLIIKLPKYSLFELENGRKRMLASAGELQKGNELALPSKYVNFLYLASHYEKLKGSPEDNEQKQLFVEQHKHYLDEIIEQISEFSKRVILADANLDKVLSAYNKHRDKPIREQAENIIHLFTLTNLGAPAAFKYFDTTIDRKRYTSTKEVLDATLIHQSITGLYETRIDLSQLGGDAYPYDVPDYASLGSGSPKKKRKVEDPKKKRKVDGSGSETPGTSESATPESRTLEMAAAEAANCIMENFVATLANGMSLQPPLEEVSCGQAESSEKPNAEDMTSKDYYFDSYAHFGIHEEMLKDEVRTLTYRNSMFHNRHLFKDKVVLDVGSGTGILCMFAAKAGARKVIGIECSSISDYAVKIVKANKLDHVVTIIKGKVEEVELPVEKVDIIISEWMGYCLFYESMLNTVLYARDKWLAPDGLIFPDRATLYVTAIEDRQYKDYKIHWWENVYGFDMSCIKDVAIKEPLVDVVDPKQLVTNACLIKEVDIYTVKVEDLTFTSPFCLQVKRNDYVHALVAYFNIEFTRCHKRTGFSTSPESPYTHWKQTVFYMEDYLTVKTGEEIFGTIGMRPNAKNNRDLDFTIDLDFKGQLCELSCSTDYRMRX

SEQ ID NO: 121 - protein, 2663 aa, synthetic construct
  REGION 1..2663: note = V70 fusion
  SITE 2663: note = misc_feature - Xaa =
MPAAKRVKLDGSTGPATMNHDQEFDPPKVYPPVPAEKRKPIRVLSLFDGIATGLLVLKDLGIQVDRYIASEVCEDSITVGMVRHQGKIMYVGDVRSVTQKHIQEWGPFDLVIGGSPCNDLSIVNPARKGLYEGTGRLFFEFYRLLHDARPKEGDDRPFFWLFENVVAMGVSDKRDISRFLESNPVMIDAKEVSAAHRARYFWGNLPGMNRPLASTVNDKLELQECLEHGRIAKFSKVRTITTRSNSIKQGKDQHFPVFMNEKEDILWCTEMERVFGFPVHYTDVSNMSRLARQRLLGRSWSVPVIRHLFAPLKEYFACVSSGNSNANSRGPSFSSGLVPLSLRGSHMGPMEIYKTVSAWKRQPVRVLSLFRNIDKVLKSLGFLESGSGSGGGTLKYVEDVTNVVRRDVEKWGPFDLVYGSTQPLGSSCDRCPGWYMFQFHRILQYALPRQESQRPFFWIFMDNLLLTEDDQETTTRFLQTEAVTLQDVRGRDYQNAMRVWSNIPGLKSKHAPLTPKEEEYLQAQVRSRSKLDAPKVDLLVKNCLLPLREYFKYFSQNSLPLGGPSSGAPPPSGGSPAGSPTSTEEGTSESATPESGPGTSTEPSEGSAPGSPAGSPTSTEEGTSTEPSEGSAPGTSTEPSEPKKKRKVMDKKYSIGLAIGTNSVGWAVITDEYKVPSKKFKVLGNTDRHSIKKNLIGALLFDSGETAEATRLKRTARRRYTRRKNRICYLQEIFSNEMAKVDDSFFHRLEESFLVEEDKKHERHPIFGNIVDEVAYHEKYPTIYHLRKKLVDSTDKADLRLIYLALAHMIKFRGHFLIEGDLNPDNSDVDKLFIQLVQTYNQLFEENPINASGVDAKAILSARLSKSRRLENLIAQLPGEKKNGLFGNLIALSLGLTPNFKSNFDLAEDAKLQLSKDTYDDDLDNLLAQIGDQYADLFLAAKNLSDAILLSDILRVNTEITKAPLSASMIKRYDEHHQDLTLLKALVRQQLPEKYKEIFFDQSKNGYAGYIDGGASQEEFYKFIKPILEKMDGTEELLVKLNREDLLRKQRTFDNGSIPHQIHLGELHAILRRQEDFYPFLKDNREKIEKILTFRIPYYVGPLARGNSRFAWMTRKSEETITPWNFEEVVDKGASAQSFIERMTNFDKNLPNEKVLPKHSLLYEYFTVYNELTKVKYVTEGMRKPAFLSGEQKKAIVDLLFKTNRKVTVKQLKEDYFKKIECFDSVEISGVEDRFNASLGTYHDLLKIIKDKDFLDNEENEDILEDIVLTLTLFEDREMIEERLKTYAHLFDDKVMKQLKRRRYTGWGRLSRKLINGIRDKQSGKTILDFLKSDGFANRNFMQLIHDDSLTFKEDIQKAQVSGQGDSLHEHIANLAGSPAIKKGILQTVKVVDELVKVMGRHKPENIVIEMARENQTTQKGQKNSRERMKRIEEGIKELGSQILKEHPVENTQLQNEKLYLYYLQNGRDMYVDQELDINRLSDYDVDAIVPQSFLKDDSIDNKVLTRSDKNRGKSDNVPSEEVVKKMKNYWRQLLNAKLITQRKFDNLTKAERGGLSELDKAGFIKRQLVETRQITKHVAQILDSRMNTKYDENDKLIREVKVITLKSKLVSDFRKDFQFYKVREINNYHHAHDAYLNAVVGTALIKKYPKLESEFVYGDYKVYDVRKMIAKSEQEIGKATAKYFFYSNIMNFFKTEITLANGEIRKRPLIETNGETGEIVWDKGRDFATVRKVLSMPQVNIVKKTEVQTGGFSKESILPKRNSDKLIARKKDWDPKKYGGFDSPTVAYSVLVVAKVEKGKSKKLKSVKELLGITIMERSSFEKNPIDFLEAKGYKEVKKDLIIKLPKYSLFELENGRKRMLASAGELQKGNELALPSKYVNFLYLASHYEKLKGSPEDNEQKQLFVEQHKHYLDEIIEQISEFSKRVILADANLDKVLSAYNKHRDKPIREQAENIIHLFTLTNLGAPAAFKYFDTTIDRKRYTSTKEVLDATLIHQSITGLYETRIDLSQLGGDAYPYDVPDYASLGSGSPKKKRKVEDPKKKRKVDGSGSETPGTSESATPESRTLETPPPQVAYSKERIPGKGVFINTGPEFLVGCDCKDGCRDKSKCACHQLTIQATACTPGGQINPNSGYQYKRLEECLPTGVYECNKRCKCDPNMCTNRLVQHGLQVRLQLFKTQNKGWGIRCLDDIAKGSFVCIYAGKILTDDFADKEGLEMGDEYFANLDHIESVENFKEGYESDAPCSSDSSGVDLKDQEDGNSGTEDPEESNDDSSDDNFCKDEDFSTSSVWRSYATRRQTRGQKENGLSETTSKDSHPPDLGPPHIPVPPSIPVGGCNPPSSEETPKNKVASWLSCNSVSEGGFADSDSHSSFKTNEGGEGRAGGSRMEAEKASTSGLGIKDEGDIKQAKKEDTDDRNKMSVVTESSRNYGYNPSPVKPEGLRRPPSKTSMHQSRRLMASAQSNPDDVLTLSSSTESEGESGTSRKPTAGQTSATAVDSDDIQTISSGSEGDDFEDKKNMTGPMKRQVAVKSTRGFALKSTHGIAIKSTNMASVDKGESAPVRKNTRQFYDGEESCYIIDAKLEGNLGRYLNHSCSPNLFVQNVFVDTHDLRFPWVAFFASKRIRAGTELTWDYNYEVGSVEGKELLCCCGAIECRGRLLX

SEQ ID NO: 122 - protein, 2372 aa, synthetic construct
  REGION 1..2372: note = V71 fusion
  SITE 2372: note = misc_feature - Xaa =
MPAAKRVKLDGSTGPATMNHDQEFDPPKVYPPVPAEKRKPIRVLSLFDGIATGLLVLKDLGIQVDRYIASEVCEDSITVGMVRHQGKIMYVGDVRSVTQKHIQEWGPFDLVIGGSPCNDLSIVNPARKGLYEGTGRLFFEFYRLLHDARPKEGDDRPFFWLFENVVAMGVSDKRDISRFLESNPVMIDAKEVSAAHRARYFWGNLPGMNRPLASTVNDKLELQECLEHGRIAKFSKVRTITTRSNSIKQGKDQHFPVFMNEKEDILWCTEMERVFGFPVHYTDVSNMSRLARQRLLGRSWSVPVIRHLFAPLKEYFACVSSGNSNANSRGPSFSSGLVPLSLRGSHMGPMEIYKTVSAWKRQPVRVLSLFRNIDKVLKSLGFLESGSGSGGGTLKYVEDVTNVVRRDVEKWGPFDLVYGSTQPLGSSCDRCPGWYMFQFHRILQYALPRQESQRPFFWIFMDNLLLTEDDQETTTRFLQTEAVTLQDVRGRDYQNAMRVWSNIPGLKSKHAPLTPKEEEYLQAQVRSRSKLDAPKVDLLVKNCLLPLREYFKYFSQNSLPLGGPSSGAPPPSGGSPAGSPTSTEEGTSESATPESGPGTSTEPSEGSAPGSPAGSPTSTEEGTSTEPSEGSAPGTSTEPSEPKKKRKVMDKKYSIGLAIGTNSVGWAVITDEYKVPSKKFKVLGNTDRHSIKKNLIGALLFDSGETAEATRLKRTARRRYTRRKNRICYLQEIFSNEMAKVDDSFFHRLEESFLVEEDKKHERHPIFGNIVDEVAYHEKYPTIYHLRKKLVDSTDKADLRLIYLALAHMIKFRGHFLIEGDLNPDNSDVDKLFIQLVQTYNQLFEENPINASGVDAKAILSARLSKSRRLENLIAQLPGEKKNGLFGNLIALSLGLTPNFKSNFDLAEDAKLQLSKDTYDDDLDNLLAQIGDQYADLFLAAKNLSDAILLSDILRVNTEITKAPLSASMIKRYDEHHQDLTLLKALVRQQLPEKYKEIFFDQSKNGYAGYIDGGASQEEFYKFIKPILEKMDGTEELLVKLNREDLLRKQRTFDNGSIPHQIHLGELHAILRRQEDFYPFLKDNREKIEKILTFRIPYYVGPLARGNSRFAWMTRKSEETITPWNFEEVVDKGASAQSFIERMTNFDKNLPNEKVLPKHSLLYEYFTVYNELTKVKYVTEGMRKPAFLSGEQKKAIVDLLFKTNRKVTVKQLKEDYFKKIECFDSVEISGVEDRFNASLGTYHDLLKIIKDKDFLDNEENEDILEDIVLTLTLFEDREMIEERLKTYAHLFDDKVMKQLKRRRYTGWGRLSRKLINGIRDKQSGKTILDFLKSDGFANRNFMQLIHDDSLTFKEDIQKAQVSGQGDSLHEHIANLAGSPAIKKGILQTVKVVDELVKVMGRHKPENIVIEMARENQTTQKGQKNSRERMKRIEEGIKELGSQILKEHPVENTQLQNEKLYLYYLQNGRDMYVDQELDINRLSDYDVDAIVPQSFLKDDSIDNKVLTRSDKNRGKSDNVPSEEVVKKMKNYWRQLLNAKLITQRKFDNLTKAERGGLSELDKAGFIKRQLVETRQITKHVAQILDSRMNTKYDENDKLIREVKVITLKSKLVSDFRKDFQFYKVREINNYHHAHDAYLNAVVGTALIKKYPKLESEFVYGDYKVYDVRKMIAKSEQEIGKATAKYFFYSNIMNFFKTEITLANGEIRKRPLIETNGETGEIVWDKGRDFATVRKVLSMPQVNIVKKTEVQTGGFSKESILPKRNSDKLIARKKDWDPKKYGGFDSPTVAYSVLVVAKVEKGKSKKLKSVKELLGITIMERSSFEKNPIDFLEAKGYKEVKKDLIIKLPKYSLFELENGRKRMLASAGELQKGNELALPSKYVNFLYLASHYEKLKGSPEDNEQKQLFVEQHKHYLDEIIEQISEFSKRVILADANLDKVLSAYNKHRDKPIREQAENIIHLFTLTNLGAPAAFKYFDTTIDRKRYTSTKEVLDATLIHQSITGLYETRIDLSQLGGDAYPYDVPDYASLGSGSPKKKRKVEDPKKKRKVDGSGSETPGTSESATPESRTLETILKDLLPETIPPPELDDMTLWQIVINILSEPPKRKKRKDINTIEDAVKLLQECKKIIVLTGAGVSVSCGIPDFRSRDGIYARLAVDFPDLPDPQAMFDIEYFRKDPRPFFKFAKEIYPGQFQPSLCHKFIALSDKEGKLLRNYTQNIDTLEQVAGIQRIIQCHGSFATASCLICKYKVDCEAVRGDIFNQVVPRCPRCPADEPLAIMKPEIVFFGENLPEQFHRAMKYDKDEVDLLIVIGSSLKVRPVALIPSSIPHEVPQILINREPLPHLHFDVELLGDCDVIINELCHRLGGEYAKLX

SEQ ID NO: 123 - protein, 2708 aa, synthetic construct
  REGION 1..2708: note = V72 fusion
  SITE 2708: note = misc_feature - Xaa =
MPAAKRVKLDGSTGPATMNHDQEFDPPKVYPPVPAEKRKPIRVLSLFDGIATGLLVLKDLGIQVDRYIASEVCEDSITVGMVRHQGKIMYVGDVRSVTQKHIQEWGPFDLVIGGSPCNDLSIVNPARKGLYEGTGRLFFEFYRLLHDARPKEGDDRPFFWLFENVVAMGVSDKRDISRFLESNPVMIDAKEVSAAHRARYFWGNLPGMNRPLASTVNDKLELQECLEHGRIAKFSKVRTITTRSNSIKQGKDQHFPVFMNEKEDILWCTEMERVFGFPVHYTDVSNMSRLARQRLLGRSWSVPVIRHLFAPLKEYFACVSSGNSNANSRGPSFSSGLVPLSLRGSHMGPMEIYKTVSAWKRQPVRVLSLFRNIDKVLKSLGFLESGSGSGGGTLKYVEDVTNVVRRDVEKWGPFDLVYGSTQPLGSSCDRCPGWYMFQFHRILQYALPRQESQRPFFWIFMDNLLLTEDDQETTTRFLQTEAVTLQDVRGRDYQNAMRVWSNIPGLKSKHAPLTPKEEEYLQAQVRSRSKLDAPKVDLLVKNCLLPLREYFKYFSQNSLPLGGPSSGAPPPSGGSPAGSPTSTEEGTSESATPESGPGTSTEPSEGSAPGSPAGSPTSTEEGTSTEPSEGSAPGTSTEPSEPKKKRKVMDKKYSIGLAIGTNSVGWAVITDEYKVPSKKFKVLGNTDRHSIKKNLIGALLFDSGETAEATRLKRTARRRYTRRKNRICYLQEIFSNEMAKVDDSFFHRLEESFLVEEDKKHERHPIFGNIVDEVAYHEKYPTIYHLRKKLVDSTDKADLRLIYLALAHMIKFRGHFLIEGDLNPDNSDVDKLFIQLVQTYNQLFEENPINASGVDAKAILSARLSKSRRLENLIAQLPGEKKNGLFGNLIALSLGLTPNFKSNFDLAEDAKLQLSKDTYDDDLDNLLAQIGDQYADLFLAAKNLSDAILLSDILRVNTEITKAPLSASMIKRYDEHHQDLTLLKALVRQQLPEKYKEIFFDQSKNGYAGYIDGGASQEEFYKFIKPILEKMDGTEELLVKLNREDLLRKQRTFDNGSIPHQIHLGELHAILRRQEDFYPFLKDNREKIEKILTFRIPYYVGPLARGNSRFAWMTRKSEETITPWNFEEVVDKGASAQSFIERMTNFDKNLPNEKVLPKHSLLYEYFTVYNELTKVKYVTEGMRKPAFLSGEQKKAIVDLLFKTNRKVTVKQLKEDYFKKIECFDSVEISGVEDRFNASLGTYHDLLKIIKDKDFLDNEENEDILEDIVLTLTLFEDREMIEERLKTYAHLFDDKVMKQLKRRRYTGWGRLSRKLINGIRDKQSGKTILDFLKSDGFANRNFMQLIHDDSLTFKEDIQKAQVSGQGDSLHEHIANLAGSPAIKKGILQTVKVVDELVKVMGRHKPENIVIEMARENQTTQKGQKNSRERMKRIEEGIKELGSQILKEHPVENTQLQNEKLYLYYLQNGRDMYVDQELDINRLSDYDVDAIVPQSFLKDDSIDNKVLTRSDKNRGKSDNVPSEEVVKKMKNYWRQLLNAKLITQRKFDNLTKAERGGLSELDKAGFIKRQLVETRQITKHVAQILDSRMNTKYDENDKLIREVKVITLKSKLVSDFRKDFQFYKVREINNYHHAHDAYLNAVVGTALIKKYPKLESEFVYGDYKVYDVRKMIAKSEQEIGKATAKYFFYSNIMNFFKTEITLANGEIRKRPLIETNGETGEIVWDKGRDFATVRKVLSMPQVNIVKKTEVQTGGFSKESILPKRNSDKLIARKKDWDPKKYGGFDSPTVAYSVLVVAKVEKGKSKKLKSVKELLGITIMERSSFEKNPIDFLEAKGYKEVKKDLIIKLPKYSLFELENGRKRMLASAGELQKGNELALPSKYVNFLYLASHYEKLKGSPEDNEQKQLFVEQHKHYLDEIIEQISEFSKRVILADANLDKVLSAYNKHRDKPIREQAENIIHLFTLTNLGAPAAFKYFDTTIDRKRYTSTKEVLDATLIHQSITGLYETRIDLSQLGGDAYPYDVPDYASLGSGSPKKKRKVEDPKKKRKVDGSGSETPGTSESATPESRTLEMAAMAVGGAGGSRVSSGRDLNCVPEIADTLGAVAKQGFDFLCMPVFHPRFKREFIQEPAKNRPGPQTRSDLLLSGRDWNTLIVGKLSPWIRPDSKVEKIRRNSEAAMLQELNFGAYLGLPAFLLPLNQEDNTNLARVLTNHIHTGHHSSMFWMRVPLVAPEDLRDDIIENAPTTHTEEYSGEEKTWMWWHNFRTLCDYSKRIAVALEIGADLPSNHVIDRWLGEPIKAAILPTSIFLTNKKGFPVLSKMHQRLIFRLLKLEVQFIITGTNHHSEKEFCSYLQYLEYLSQNRPPPNAYELFAKGYEDYLQSPLQPLMDNLESQTYEVFEKDPIKYSQYQQAIYKCLLDRVPEEEKDTNVQVLMVLGAGRGPLVNASLRAAKQADRRIKLYAVEKNPNAVVTLENWQFEEWGSQVTVVSSDMREWVAPEKADIIVSELLGSFADNELSPECLDGAQHFLKDDGVSIPGEYTSFLAPISSSKLYNEVRACREKDRDPEAQFEMPYVVRLHNFHQLSAPQPCFTFSHPNRDPMIDNNRYCTLEFPVEVNTVLHGFAGYFETVLYQDITLSIRPETHSPGMFSWFPILFPIKQPITVREGQTICVRFWRCSNSKKVWYEWAVTAPVCSAIHNPTGRSYTIGLX

SEQ ID NO: 124 - protein, 2260 aa, synthetic construct
  REGION 1..2260: note = V73 fusion
  SITE 2260: note = misc_feature - Xaa =
MPAAKRVKLDGSTGPATMNHDQEFDPPKVYPPVPAEKRKPIRVLSLFDGIATGLLVLKDLGIQVDRYIASEVCEDSITVGMVRHQGKIMYVGDVRSVTQKHIQEWGPFDLVIGGSPCNDLSIVNPARKGLYEGTGRLFFEFYRLLHDARPKEGDDRPFFWLFENVVAMGVSDKRDISRFLESNPVMIDAKEVSAAHRARYFWGNLPGMNRPLASTVNDKLELQECLEHGRIAKFSKVRTITTRSNSIKQGKDQHFPVFMNEKEDILWCTEMERVFGFPVHYTDVSNMSRLARQRLLGRSWSVPVIRHLFAPLKEYFACVSSGNSNANSRGPSFSSGLVPLSLRGSHMGPMEIYKTVSAWKRQPVRVLSLFRNIDKVLKSLGFLESGSGSGGGTLKYVEDVTNVVRRDVEKWGPFDLVYGSTQPLGSSCDRCPGWYMFQFHRILQYALPRQESQRPFFWIFMDNLLLTEDDQETTTRFLQTEAVTLQDVRGRDYQNAMRVWSNIPGLKSKHAPLTPKEEEYLQAQVRSRSKLDAPKVDLLVKNCLLPLREYFKYFSQNSLPLGGPSSGAPPPSGGSPAGSPTSTEEGTSESATPESGPGTSTEPSEGSAPGSPAGSPTSTEEGTSTEPSEGSAPGTSTEPSEPKKKRKVMDKKYSIGLAIGTNSVGWAVITDEYKVPSKKFKVLGNTDRHSIKKNLIGALLFDSGETAEATRLKRTARRRYTRRKNRICYLQEIFSNEMAKVDDSFFHRLEESFLVEEDKKHERHPIFGNIVDEVAYHEKYPTIYHLRKKLVDSTDKADLRLIYLALAHMIKFRGHFLIEGDLNPDNSDVDKLFIQLVQTYNQLFEENPINASGVDAKAILSARLSKSRRLENLIAQLPGEKKNGLFGNLIALSLGLTPNFKSNFDLAEDAKLQLSKDTYDDDLDNLLAQIGDQYADLFLAAKNLSDAILLSDILRVNTEITKAPLSASMIKRYDEHHQDLTLLKALVRQQLPEKYKEIFFDQSKNGYAGYIDGGASQEEFYKFIKPILEKMDGTEELLVKLNREDLLRKQRTFDNGSIPHQIHLGELHAILRRQEDFYPFLKDNREKIEKILTFRIPYYVGPLARGNSRFAWMTRKSEETITPWNFEEVVDKGASAQSFIERMTNFDKNLPNEKVLPKHSLLYEYFTVYNELTKVKYVTEGMRKPAFLSGEQKKAIVDLLFKTNRKVTVKQLKEDYFKKIECFDSVEISGVEDRFNASLGTYHDLLKIIKDKDFLDNEENEDILEDIVLTLTLFEDREMIEERLKTYAHLFDDKVMKQLKRRRYTGWGRLSRKLINGIRDKQSGKTILDFLKSDGFANRNFMQLIHDDSLTFKEDIQKAQVSGQGDSLHEHIANLAGSPAIKKGILQTVKVVDELVKVMGRHKPENIVIEMARENQTTQKGQKNSRERMKRIEEGIKELGSQILKEHPVENTQLQNEKLYLYYLQNGRDMYVDQELDINRLSDYDVDAIVPQSFLKDDSIDNKVLTRSDKNRGKSDNVPSEEVVKKMKNYWRQLLNAKLITQRKFDNLTKAERGGLSELDKAGFIKRQLVETRQITKHVAQILDSRMNTKYDENDKLIREVKVITLKSKLVSDFRKDFQFYKVREINNYHHAHDAYLNAVVGTALIKKYPKLESEFVYGDYKVYDVRKMIAKSEQEIGKATAKYFFYSNIMNFFKTEITLANGEIRKRPLIETNGETGEIVWDKGRDFATVRKVLSMPQVNIVKKTEVQTGGFSKESILPKRNSDKLIARKKDWDPKKYGGFDSPTVAYSVLVVAKVEKGKSKKLKSVKELLGITIMERSSFEKNPIDFLEAKGYKEVKKDLIIKLPKYSLFELENGRKRMLASAGELQKGNELALPSKYVNFLYLASHYEKLKGSPEDNEQKQLFVEQHKHYLDEIIEQISEFSKRVILADANLDKVLSAYNKHRDKPIREQAENIIHLFTLTNLGAPAAFKYFDTTIDRKRYTSTKEVLDATLIHQSITGLYETRIDLSQLGGDAYPYDVPDYASLGSGSPKKKRKVEDPKKKRKVDGSGSETPGTSESATPESRTLGKKTKRTADSSSSEDEEEYVVEKVLDRRVVKGQVEYLLKWKGFSEEHNTWEPEKNLDCPELISEFMKKYKKMKEGENNKPREKSESNKRKSNFSNSADDIKSKKKREQSNDIARGFERGLEPEKIIGATDSCGDLMFLMKWKDTDEADLVLAKEANVKCPQIVIAFYEERLTWHAYPEDAENKEKETAKSX

SEQ ID NO: 125 - protein, 2417 aa, synthetic construct
  REGION 1..2417: note = V74 fusion
  SITE 2417: note = misc_feature - Xaa =
MPAAKRVKLDGSTGPATMNHDQEFDPPKVYPPVPAEKRKPIRVLSLFDGIATGLLVLKDLGIQVDRYIASEVCEDSITVGMVRHQGKIMYVGDVRSVTQKHIQEWGPFDLVIGGSPCNDLSIVNPARKGLYEGTGRLFFEFYRLLHDARPKEGDDRPFFWLFENVVAMGVSDKRDISRFLESNPVMIDAKEVSAAHRARYFWGNLPGMNRPLASTVNDKLELQECLEHGRIAKFSKVRTITTRSNSIKQGKDQHFPVFMNEKEDILWCTEMERVFGFPVHYTDVSNMSRLARQRLLGRSWSVPVIRHLFAPLKEYFACVSSGNSNANSRGPSFSSGLVPLSLRGSHMGPMEIYKTVSAWKRQPVRVLSLFRNIDKVLKSLGFLESGSGSGGGTLKYVEDVTNVVRRDVEKWGPFDLVYGSTQPLGSSCDRCPGWYMFQFHRILQYALPRQESQRPFFWIFMDNLLLTEDDQETTTRFLQTEAVTLQDVRGRDYQNAMRVWSNIPGLKSKHAPLTPKEEEYLQAQVRSRSKLDAPKVDLLVKNCLLPLREYFKYFSQNSLPLGGPSSGAPPPSGGSPAGSPTSTEEGTSESATPESGPGTSTEPSEGSAPGSPAGSPTSTEEGTSTEPSEGSAPGTSTEPSEPKKKRKVMDKKYSIGLAIGTNSVGWAVITDEYKVPSKKFKVLGNTDRHSIKKNLIGALLFDSGETAEATRLKRTARRRYTRRKNRICYLQEIFSNEMAKVDDSFFHRLEESFLVEEDKKHERHPIFGNIVDEVAYHEKYPTIYHLRKKLVDSTDKADLRLIYLALAHMIKFRGHFLIEGDLNPDNSDVDKLFIQLVQTYNQLFEENPINASGVDAKAILSARLSKSRRLENLIAQLPGEKKNGLFGNLIALSLGLTPNFKSNFDLAEDAKLQLSKDTYDDDLDNLLAQIGDQYADLFLAAKNLSDAILLSDILRVNTEITKAPLSASMIKRYDEHHQDLTLLKALVRQQLPEKYKEIFFDQSKNGYAGYIDGGASQEEFYKFIKPILEKMDGTEELLVKLNREDLLRKQRTFDNGSIPHQIHLGELHAILRRQEDFYPFLKDNREKIEKILTFRIPYYVGPLARGNSRFAWMTRKSEETITPWNFEEVVDKGASAQSFIERMTNFDKNLPNEKVLPKHSLLYEYFTVYNELTKVKYVTEGMRKPAFLSGEQKKAIVDLLFKTNRKVTVKQLKEDYFKKIECFDSVEISGVEDRFNASLGTYHDLLKIIKDKDFLDNEENEDILEDIVLTLTLFEDREMIEERLKTYAHLFDDKVMKQLKRRRYTGWGRLSRKLINGIRDKQSGKTILDFLKSDGFANRNFMQLIHDDSLTFKEDIQKAQVSGQGDSLHEHIANLAGSPAIKKGILQTVKVVDELVKVMGRHKPENIVIEMARENQTTQKGQKNSRERMKRIEEGIKELGSQILKEHPVENTQLQNEKLYLYYLQNGRDMYVDQELDINRLSDYDVDAIVPQSFLKDDSIDNKVLTRSDKNRGKSDNVPSEEVVKKMKNYWRQLLNAKLITQRKFDNLTKAERGGLSELDKAGFIKRQLVETRQITKHVAQILDSRMNTKYDENDKLIREVKVITLKSKLVSDFRKDFQFYKVREINNYHHAHDAYLNAVVGTALIKKYPKLESEFVYGDYKVYDVRKMIAKSEQEIGKATAKYFFYSNIMNFFKTEITLANGEIRKRPLIETNGETGEIVWDKGRDFATVRKVLSMPQVNIVKKTEVQTGGFSKESILPKRNSDKLIARKKDWDPKKYGGFDSPTVAYSVLVVAKVEKGKSKKLKSVKELLGITIMERSSFEKNPIDFLEAKGYKEVKKDLIIKLPKYSLFELENGRKRMLASAGELQKGNELALPSKYVNFLYLASHYEKLKGSPEDNEQKQLFVEQHKHYLDEIIEQISEFSKRVILADANLDKVLSAYNKHRDKPIREQAENIIHLFTLTNLGAPAAFKYFDTTIDRKRYTSTKEVLDATLIHQSITGLYETRIDLSQLGGDAYPYDVPDYASLGSGSPKKKRKVEDPKKKRKVDGSGSETPGTSESATPESRTLEPPPNAYELFAKGYEDYLQSPLQPLMDNLESQTYEVFEKDPIKYSQYQQAIYKCLLDRVPEEEKDTNVQVLMVLGAGRGPLVNASLRAAKQADRRIKLYAVEKNPNAVVTLENWQFEEWGSQVTVVSSDMREWVAPEKADIIVSELLGSFADNELSPECLDGAQHFLKDDGVSIPGEYTSFLAPISSSKLYNEVRACREKDRDPEAQFEMPYVVRLHNFHQLSAPQPCFTFSHPNRDPMIDNNRYCTLEFPVEVNTVLHGFAGYFETVLYQDITLSIRPETHSPGMFSWFPILFPIKQPITVREGQTICVRFWRCSNSKKVWYEWAVTAPVCSAIHNPTGRSYTIGLX

SEQ ID NO: 126 - protein, 3186 aa, synthetic construct
  REGION 1..3186: note = V75 fusion
  SITE 3186: note = misc_feature - Xaa =
MNHDQEFDPPKVYPPVPAEKRKPIRVLSLFDGIATGLLVLKDLGIQVDRYIASEVCEDSITVGMVRHQGKIMYVGDVRSVTQKHIQEWGPFDLVIGGSPCNDLSIVNPARKGLYEGTGRLFFEFYRLLHDARPKEGDDRPFFWLFENVVAMGVSDKRDISRFLESNPVMIDAKEVSAAHRARYFWGNLPGMNRPLASTVNDKLELQECLEHGRIAKFSKVRTITTRSNSIKQGKDQHFPVFMNEKEDILWCTEMERVFGFPVHYTDVSNMSRLARQRLLGRSWSVPVIRHLFAPLKEYFACVSSGNSNANSRGPSFSSGLVPLSLRGSHMGPMEIYKTVSAWKRQPVRVLSLFRNIDKVLKSLGFLESGSGSGGGTLKYVEDVTNVVRRDVEKWGPFDLVYGSTQPLGSSCDRCPGWYMFQFHRILQYALPRQESQRPFFWIFMDNLLLTEDDQETTTRFLQTEAVTLQDVRGRDYQNAMRVWSNIPGLKSKHAPLTPKEEEYLQAQVRSRSKLDAPKVDLLVKNCLLPLREYFKYFSQNSLPLGGPSSGAPPPSGGSPAGSPTSTEEGTSESATPESGPGTSTEPSEGSAPGSPAGSPTSTEEGTSTEPSEGSAPGTSTEPSEPKKKRKVMDKKYSIGLAIGTNSVGWAVITDEYKVPSKKFKVLGNTDRHSIKKNLIGALLFDSGETAEATRLKRTARRRYTRRKNRICYLQEIFSNEMAKVDDSFFHRLEESFLVEEDKKHERHPIFGNIVDEVAYHEKYPTIYHLRKKLVDSTDKADLRLIYLALAHMIKFRGHFLIEGDLNPDNSDVDKLFIQLVQTYNQLFEENPINASGVDAKAILSARLSKSRRLENLIAQLPGEKKNGLFGNLIALSLGLTPNFKSNFDLAEDAKLQLSKDTYDDDLDNLLAQIGDQYADLFLAAKNLSDAILLSDILRVNTEITKAPLSASMIKRYDEHHQDLTLLKALVRQQLPEKYKEIFFDQSKNGYAGYIDGGASQEEFYKFIKPILEKMDGTEELLVKLNREDLLRKQRTFDNGSIPHQIHLGELHAILRRQEDFYPFLKDNREKIEKILTFRIPYYVGPLARGNSRFAWMTRKSEETITPWNFEEVVDKGASAQSFIERMTNFDKNLPNEKVLPKHSLLYEYFTVYNELTKVKYVTEGMRKPAFLSGEQKKAIVDLLFKTNRKVTVKQLKEDYFKKIECFDSVEISGVEDRFNASLGTYHDLLKIIKDKDFLDNEENEDILEDIVLTLTLFEDREMIEERLKTYAHLFDDKVMKQLKRRRYTGWGRLSRKLINGIRDKQSGKTILDFLKSDGFANRNFMQLIHDDSLTFKEDIQKAQVSGQGDSLHEHIANLAGSPAIKKGILQTVKVVDELVKVMGRHKPENIVIEMARENQTTQKGQKNSRERMKRIEEGIKELGSQILKEHPVENTQLQNEKLYLYYLQNGRDMYVDQELDINRLSDYDVDAIVPQSFLKDDSIDNKVLTRSDKNRGKSDNVPSEEVVKKMKNYWRQLLNAKLITQRKFDNLTKAERGGLSELDKAGFIKRQLVETRQITKHVAQILDSRMNTKYDENDKLIREVKVITLKSKLVSDFRKDFQFYKVREINNYHHAHDAYLNAVVGTALIKKYPKLESEFVYGDYKVYDVRKMIAKSEQEIGKATAKYFFYSNIMNFFKTEITLANGEIRKRPLIETNGETGEIVWDKGRDFATVRKVLSMPQVNIVKKTEVQTGGFSKESILPKRNSDKLIARKKDWDPKKYGGFDSPTVAYSVLVVAKVEKGKSKKLKSVKELLGITIMERSSFEKNPIDFLEAKGYKEVKKDLIIKLPKYSLFELENGRKRMLASAGELQKGNELALPSKYVNFLYLASHYEKLKGSPEDNEQKQLFVEQHKHYLDEIIEQISEFSKRVILADANLDKVLSAYNKHRDKPIREQAENIIHLFTLTNLGAPAAFKYFDTTIDRKRYTSTKEVLDATLIHQSITGLYETRIDLSQLGGDAYPYDVPDYASLGSGSPKKKRKVEDPKKKRKVDGSGSETPGTSESATPESRTLLSGKKAAAAAAAAAAAATGTEAGPGTAGGSENGSEVAAQPAGLSGPAEVGPGAVGERTPRKKEPPRASPPGGLAEPPGSAGPQAGPTVVPGSATPMETGIAETPEGRRTSRRKRAKVEYREMDESLANLSEDEYYSEEERNAKAEKEKKLPPPPPQAPPEEENESEPEEPSGQAGGLQDDSSGGYGDGQASGVEGAAFQSRLPHDRMTSQEAACFPDIISGPQQTQKVFLFIRNRTLQLWLDNPKIQLTFEATLQQLEAPYNSDTVLVHRVHSYLERHGLINFGIYKRIKPLPTKKTGKVIIIGSGVSGLAAARQLQSFGMDVTLLEARDRVGGRVATFRKGNYVADLGAMVVTGLGGNPMAVVSKQVNMELAKIKQKCPLYEANGQADTVKVPKEKDEMVEQEFNRLLEATSYLSHQLDFNVLNNKPVSLGQALEVVIQLQEKHVKDEQIEHWKKIVKTQEELKELLNKMVNLKEKIKELHQQYKEASEVKPPRDITAEFLVKSKHRDLTALCKEYDELAETQGKLEEKLQELEANPPSDVYLSSRDRQILDWHFANLEFANATPLSTLSLKHWDQDDDFEFTGSHLTVRNGYSCVPVALAEGLDIKLNTAVRQVRYTASGCEVIAVNTRSTSQTFIYKCDAVLCTLPLGVLKQQPPAVQFVPPLPEWKTSAVQRMGFGNLNKVVLCFDRVFWDPSVNLFGHVGSTTASRGELFLFWNLYKAPILLALVAGEAAGIMENISDDVIVGRCLAILKGIFGSSAVPQPKETVVSRWRADPWARGSYSYVAAGSSGNDYDLMAQPITPGPSIPGAPQPIPRLFFAGEHTIRNYPATVHGALLSGLREAGRIADQFLGAMYTLPRQATPGVPAQQSPSMEGSGATNFSLLKQAGDVEENPGPMHMSELIKENMHMKLYMEGTVDNHHFKCTSEGEGKPYEGTQTMRIKVVEGGPLPFAFDILATSFLYGSKTFINHTQGIPDFFKQSFPEGFTWERVTTYEDGGVLTATQDTSLQDGCLIYNVKIRGVNFTSNGPVMQKKTLGWEAFTETLYPADGGLEGRNDMALKLVGGSHLIANIKTTYRSKKPAKNLKMPGVYYVDYRLERIKEANNETYVEQHEVAVARYCDLPSKLGHKLNX

SEQ ID NO: 127 - DNA, 10019 bp, synthetic construct
  misc_feature 1..10019: note = V7 DNA
  source 1..10019: mol_type = other DNA
attaatctagaaccggtccagccaccatgaaccatgaccaggaatttgaccccccaaaggtttacccacctgtgccagctgagaagaggaagcccatccgcgtgctgtctctctttgatgggattgctacagggctcctggtgctgaaggacctgggcatccaagtggaccgctacattgcctccgaggtgtgtgaggactccatcacggtgggcatggtgcggcaccagggaaagatcatgtacgtcggggacgtccgcagcgtcacacagaagcatatccaggagtggggcccattcgacctggtgattggaggcagtccctgcaatgacctctccattgtcaaccctgcccgcaagggactttatgagggtactggccgcctcttctttgagttctaccgcctcctgcatgatgcgcggcccaaggagggagatgatcgccccttcttctggctctttgagaatgtggtggccatgggcgttagtgacaagagggacatctcgcgatttcttgagtctaaccccgtgatgattgacgccaaagaagtgtctgctgcacacagggcccgttacttctggggtaaccttcctggcatgaacaggcctttggcatccactgtgaatgataagctggagctgcaagagtgtctggagcacggcagaatagccaagttcagcaaagtgaggaccattaccaccaggtcaaactctataaagcagggcaaagaccagcatttccccgtcttcatgaacgagaaggaggacatcctgtggtgcactgaaatggaaagggtgtttggcttccccgtccactacacagacgtctccaacatgagccgcttggcgaggcagagactgctgggccgatcgtggagcgtgccggtcatccgccacctcttcgctccgctgaaggaatattttgcttgtgtgtctagcggcaatagtaacgctaacagccgcgggccgagcttcagcagcggcctggtgccgttaagcttgcgcggcagccatatgggccctatggagatatacaagacagtgtctgcatggaagagacagccagtgcgggtactgagcctcttcagaaacatcgacaaggtactaaagagtttgggcttcttggaaagcggttctggttctgggggaggaacgctgaagtacgtggaagatgtcacaaatgtcgtgaggagagacgtggagaaatggggcccctttgacctggtgtacggctcgacgcagcccctaggcagctcttgtgatcgctgtcccggctggtacatgttccagttccaccggatcctgcagtatgcgctgcctcgccaggagagtcagcggcccttcttctggatattcatggacaatctgctgctgactgaggatgaccaagagacaactacccgcttccttcagacagaggctgtgaccctccaggatgtccgtggcagagactaccagaatgctatgcgggtgtggagcaacattccagggctgaagagcaagcatgcgcccctgaccccaaaggaagaagagtatctgcaagcccaagtcagaagcaggagcaagctggacgccccgaaagttgacctcctggtgaagaactgccttctcccgctgagagagtacttcaagtatttttctcaaaactcacttcctcttgacggcagcggcagcgagacccccggtaccagcgagagcgccacccccgagagcatgaacaattcccagggaagagtgaccttcgaggatgtcactgtgaacttcacccagggggagtggcagcggctgaatcccgaacagagaaacttgtacagggatgtgatgctggagaattacagcaaccttgtctctgtgggacaaggggaaaccaccaaacccgatgtgatcttgaggttggaacaaggaaaggagccatggttggaggaagaggaagtgctgggaagtggccgtgcagaaaaaaatggggacattggagggcagatttggaagccaaaggatgtgaaagagagtctcggagggccgagctctggcgcacccccaccaagtggagggtctcctgccgggtccccaacatctactgaagaaggcaccagcgaatccgcaacgcccgagtcaggccctggtacctccacagaaccatctgaaggtagtgcgcctggttccccagctggaagccctacttccaccgaagaaggcacgtcaaccgaaccaagtgaaggatctgcccctgggaccagcactgaaccatctgagccaaaaaagaagagaaaggtaatggacaagaagtacagcatcggcctggccatcggcaccaactctgtgggctgggccgtgatcaccgacgagtacaaggtgcccagcaagaaattcaaggtgctgggcaacaccgaccggcacagcatcaagaagaacctgatcggcgccctgctgttcgacagcggagaaacagccgaggccacccggctgaagagaaccgccagaagaagatacaccagacggaagaaccggatctgctatctgcaagagatcttcagcaacgagatggccaaggtggacgacagcttcttccacagactggaagagtccttcctggtggaagaggataagaagcacgagcggcaccccatcttcggcaacatcgtggacgaggtggcctaccacgagaagtaccccaccatctaccacctgagaaagaaactggtggacagcaccgacaaggccgacctgcggctgatctatctggccctggcccacatgatcaagttccggggccacttcctgatcgagggcgacctgaaccccgacaacagcgacgtggacaagctgttcatccagctggtgcagacctacaaccagctgttcgaggaaaaccccatcaacgccagcggcgtggacgccaaggccatcctgtctgccagactgagcaagagcagacggctggaaaatctgatcgcccagctgcccggcgagaagaagaatggcctgttcggcaacctgattgccctgagcctgggcctgacccccaacttcaagagcaacttcgacctggccgaggatgccaaactgcagctgagcaaggacacctacgacgacgacctggacaacctgctggcccagatcggcgaccagtacgccgacctgtttctggccgccaagaacctgtccgacgccatcctgctgagcgacatcctgagagtgaacaccgagatcaccaaggcccccctgagcgcctctatgatcaagagatacgacgagcaccaccaggacctgaccctgctgaaagctctcgtgcggcagcagctgcctgagaagtacaaagagattttcttcgaccagagcaagaacggctacgccggctacatcgatggcggagccagccaggaagagttctacaagttcatcaagcccatcctggaaaagatggacggcaccgaggaactgctcgtgaagctgaacagagaggacctgctgcggaagcagcggaccttcgacaacggcagcatcccccaccagatccacctgggagagctgcacgccattctgcggcggcaggaagatttttacccattcctgaaggacaaccgggaaaagatcgagaagatcctgaccttccgcatcccctactacgtgggccctctggccaggggaaacagcagattcgcctggatgaccagaaagagcgaggaaaccatcaccccctggaacttcgaggaagtggtggacaagggcgccagcgcccagagcttcatcgagcggatgaccaacttcgataagaacctgcccaacgagaaggtgctgcccaagcacagcctgctgtacgagtacttcaccgtgtacaacgagctgaccaaagtgaaatacgtgaccgagggaatgagaaagcccgccttcctgagcggcgagcagaaaaaagccatcgtggacctgctgttcaagaccaaccggaaagtgaccgtgaagcagctgaaagaggactacttcaagaaaatcgagtgcttcgactccgtggaaatctccggcgtggaagatcggttcaacgcctccctgggcacataccacgatctgctgaaaattatcaaggacaaggacttcctggacaatgaggaaaacgaggacattctggaagatatcgtgctgaccctgacactgtttgaggacagagagatgatcgaggaacggctgaaaacctatgcccacctgttcgacgacaaagtgatgaagcagctgaagcggcggagatacaccggctggggcaggctgagccggaagctgatcaacggcatccgggacaagcagtccggcaagacaatcctggatttcctgaagtccgacggcttcgccaacagaaacttcatgcagctgatccacgacgacagcctgacctttaaagaggacatccagaaagcccaggtgtccggccagggcgatagcctgcacgagcacattgccaatctggccggcagccccgccattaagaagggcatcctgcagacagtgaaggtggtggacgagctcgtgaaagtgatgggccggcacaagcccgagaacatcgtgatcgaaatggccagagagaaccagaccacccagaagggacagaagaacagccgcgagagaatgaagcggatcgaagagggcatcaaagagctgggcagccagatcctgaaagaacaccccgtggaaaacacccagctgcagaacgagaagctgtacctgtactacctgcagaatgggcgggatatgtacgtggaccaggaactggacatcaaccggctgtccgactacgatgtggacgctatcgtgcctcagagctttctgaaggacgactccatcgataacaaagtgctgactcggagcgacaagaaccggggcaagagcgacaacgtgccctccgaagaggtcgtgaagaagatgaagaactactggcgccagctgctgaatgccaagctgattacccagaggaagttcgacaatctgaccaaggccgagagaggcggcctgagcgaactggataaggccggcttcatcaagagacagctggtggaaacccggcagatcacaaagcacgtggcacagatcctggactcccggatgaacactaagtacgacgagaacgacaaactgatccgggaagtgaaagtgatcaccctgaagtccaagctggtgtccgatttccggaaggatttccagttttacaaagtgcgcgagatcaacaactaccaccacgcccacgacgcctacctgaacgccgtcgtgggaaccgccctgatcaaaaagtaccctaagctggaaagcgagttcgtgtacggcgactacaaggtgtacgacgtgcggaagatgatcgccaagagcgagcaggaaatcggcaaggctaccgccaagtacttcttctacagcaacatcatgaactttttcaagaccgagattaccctggccaacggcgagatccggaagcggcctctgatcgagacaaacggcgaaacaggcgagatcgtgtgggataagggccgggactttgccaccgtgcggaaagtgctgtctatgccccaagtgaatatcgtgaaaaagaccgaggtgcagacaggcggcttcagcaaagagtctatcctgcccaagaggaacagcgacaagctgatcgccagaaagaaggactgggaccctaagaagtacggcggcttcgacagccccaccgtggcctattctgtgctggtggtggccaaagtggaaaagggcaagtccaagaaactgaagagtgtgaaagagctgctggggatcaccatcatggaaagaagcagcttcgagaagaatcccatcgactttctggaagccaagggctacaaagaagtgaaaaaggacctgatcatcaagctgcctaagtactccctgttcgagctggaaaacggccggaagagaatgctggcctctgccggcgaactgcagaagggaaacgaactggccctgccctccaaatatgtgaacttcctgtacctggccagccactatgagaagctgaagggctcccccgaggataatgagcagaaacagctgtttgtggaacagcacaaacactacctggacgagatcatcgagcagatcagcgagttctccaagagagtgatcctggccgacgctaatctggacaaggtgctgagcgcctacaacaagcacagagacaagcctatcagagagcaggccgagaatatcatccacctgtttaccctgaccaatctgggagcccctgccgccttcaagtactttgacaccaccatcgaccggaagaggtacaccagcaccaaagaggtgctggacgccaccctgatccaccagagcatcaccggcctgtacgagacacggatcgacctgtctcagctgggaggcgacgcctatccctatgacgtgcccgattatgccagcctgggcagcggctcccccaagaaaaaacgcaaggtggaagatcctaagaaaaagcggaaagtggacggcctcgaggctactaacttcagcctgctgaagcaggctggagacgtggaggagaaccctggacctatgcattaatgagatcccaagcacgcagcaatgcagctcaaaacgcttagcctagccacacccccacgggaaacagcagtgattaacctttagcaataaacgaaagtttaactaagctatactaaccccagggttggtcaatttcgtgccagccacaccctggtactgcatgcacgcaatgctagctgcccctttcccgtcctgggcaccccgagtctcccccgaccccgggtcccaggtatgctcccacctccacctgccccactcaccacctctgctagttccagacacctccgagacgaggaaaaaaaaaaaaaaaaaaaaaaaaaaaaaaaaaaaaaaaaaaaaaaaaaaaaaaaaaaaaaaaaaaaaaaaaaaaaaaaaaaaaaaaaaaaaaaaaaaaaaaaaaaaaaaaaaaaaaaaaaaaaaaaaaaaaaaaaaaaaaaaaaaaaaaaaaaaaaaaaaaaaaaaaaaaaaaaaaaaaaaaaaaaaaaaaaaaaaaaaaaaaaaaaaaaaaaaaaaaaaaaaaaaaaaaaaaaaaaaaaaaaaaaaaaaaaaaaaaaaaaaaaaaaaaaaaaaaaaaaaaaaaaaaaaaaaaaaaaaaaaaaaaaaaaaaaaaaaaaaaaaaaaaaaaaaaaaaaaaaaaaaaaaaaaaaaaaaaaaaaaaaaaaaaaaaaaaaaaaaaaaaaaaaaaaaaaccgtcttcaagctttctagaaattcactggccgtcgttttacaacgtcgtgactgggaaaaccctggcgttacccaacttaatcgccttgcagcacatccccctttcgccagctggcgtaatagcgaagaggcccgcaccgatcgcccttcccaacagttgcgcagcctgaatggcgaatggcgcctgatgcggtattttctccttacgcatctgtgcggtatttcacaccgcatatggtgcactctcagtacaatctgctctgatgccgcatagttaagccagccccgacacccgccaacacccgctgacgcgccctgacgggcttgtctgctcccggcatccgcttacagacaagctgtgaccgtctccgggagctgcatgtgtcagaggttttcaccgtcatcaccgaaacgcgcgagacgaaagggcctcgtgatacgcctatttttataggttaatgtcatgataataatggtttcttagacgtcaggtggcacttttcggggaaatgtgcgcggaacccctatttgtttatttttctaaatacattcaaatatgtatccgctcatgagacaataaccctgataaatgcttcaataatattgaaaaaggaagagtatgagtattcaacatttccgtgtcgcccttattcccttttttgcggcattttgccttcctgtttttgctcacccagaaacgctggtgaaagtaaaagatgctgaagatcagttgggtgcacgagtgggttacatcgaactggatctcaacagcggtaagatccttgagagttttcgccccgaagaacgttttccaatgatgagcacttttaaagttctgctatgtggcgcggtattatcccgtattgacgccgggcaagagcaactcggtcgccgcatacactattctcagaatgacttggttgagtactcaccagtcacagaaaagcatcttacggatggcatgacagtaagagaattatgcagtgctgccataaccatgagtgataacactgcggccaacttacttctgacaacgatcggaggaccgaaggagctaaccgcttttttgcacaacatgggggatcatgtaactcgccttgatcgttgggaaccggagctgaatgaagccataccaaacgacgagcgtgacaccacgatgcctgtagcaatggcaacaacgttgcgcaaactattaactggcgaactacttactctagcttcccggcaacaattaatagactggatggaggcggataaagttgcaggaccacttctgcgctcggcccttccggctggctggtttattgctgataaatctggagccggtgagcgtgggtctcgcggtatcattgcagcactggggccagatggtaagccctcccgtatcgtagttatctacacgacggggagtcaggcaactatggatgaacgaaatagacagatcgctgagataggtgcctcactgattaagcattggtaactgtcagaccaagtttactcatatatactttagattgatttaaaacttcatttttaatttaaaaggatctaggtgaagatcctttttgataatctcatgaccaaaatcccttaacgtgagttttcgttccactgagcgtcagaccccgtagaaaagatcaaaggatcttcttgagatcctttttttctgcgcgtaatctgctgcttgcaaacaaaaaaaccaccgctaccagcggtggtttgtttgccggatcaagagctaccaactctttttccgaaggtaactggcttcagcagagcgcagataccaaatactgttcttctagtgtagccgtagttaggccaccacttcaagaactctgtagcaccgcctacatacctcgctctgctaatcctgttaccagtggctgctgccagtggcgataagtcgtgtcttaccgggttggactcaagacgatagttaccggataaggcgcagcggtcgggctgaacggggggttcgtgcacacagcccagcttggagcgaacgacctacaccgaactgagatacctacagcgtgagctatgagaaagcgccacgcttcccgaagggagaaaggcggacaggtatccggtaagcggcagggtcggaacaggagagcgcacgagggagcttccagggggaaacgcctggtatctttatagtcctgtcgggtttcgccacctctgacttgagcgtcgatttttgtgatgctcgtcaggggggcggagcctatggaaaaacgccagcaacgcggcctttttacggttcctggccttttgctggccttttgctcacatgttctttcctgcgttatcccctgattctgtggataaccgtattaccgcctttgagtgagctgataccgctcgccgcagccgaacgaccgagcgcagcgagtcagtgagcgaggaagcggaagagcgcccaatacgcaaaccgcctctccccgcgcgttggccgattcattaatgcagctggcacgacaggtttcccgactggaaagcgggcagtgagcgcaacgcaattaatgtgagttagctcactcattaggcaccccaggctttacactttatgcttccggctcgtatgttgtgtggaattgtgagcggataacaatttcacacaggaaacagctatgaccatgattacgcctctagaaagctttaatacgactcactataaggactcactatttgttttcgcgcccagttgcaaaaagtgtcgacatttgcttctgacacaactgtgttcactagcaacctcaaacagacacctta

SEQ ID NO: 128 - DNA, 9998 bp, synthetic construct
  misc_feature 1..9998: note = V8 DNA
  source 1..9998: mol_type = other DNA
attaagccaccatgaacaattcccagggaagagtgaccttcgaggatgtcactgtgaacttcacccagggggagtggcagcggctgaatcccgaacagagaaacttgtacagggatgtgatgctggagaattacagcaaccttgtctctgtgggacaaggggaaaccaccaaacccgatgtgatcttgaggttggaacaaggaaaggagccatggttggaggaagaggaagtgctgggaagtggccgtgcagaaaaaaatggggacattggagggcagatttggaagccaaaggatgtgaaagagagtctcagcggcagcgagacccccggtaccagcgagagcgccacccccgagagcatgaaccatgaccaggaatttgaccccccaaaggtttacccacctgtgccagctgagaagaggaagcccatccgcgtgctgtctctctttgatgggattgctacagggctcctggtgctgaaggacctgggcatccaagtggaccgctacattgcctccgaggtgtgtgaggactccatcacggtgggcatggtgcggcaccagggaaagatcatgtacgtcggggacgtccgcagcgtcacacagaagcatatccaggagtggggcccattcgacctggtgattggaggcagtccctgcaatgacctctccattgtcaaccctgcccgcaagggactttatgagggtactggccgcctcttctttgagttctaccgcctcctgcatgatgcgcggcccaaggagggagatgatcgccccttcttctggctctttgagaatgtggtggccatgggcgttagtgacaagagggacatctcgcgatttcttgagtctaaccccgtgatgattgacgccaaagaagtgtctgctgcacacagggcccgttacttctggggtaaccttcctggcatgaacaggcctttggcatccactgtgaatgataagctggagctgcaagagtgtctggagcacggcagaatagccaagttcagcaaagtgaggaccattaccaccaggtcaaactctataaagcagggcaaagaccagcatttccccgtcttcatgaacgagaaggaggacatcctgtggtgcactgaaatggaaagggtgtttggcttccccgtccactacacagacgtctccaacatgagccgcttggcgaggcagagactgctgggccgatcgtggagcgtgccggtcatccgccacctcttcgctccgctgaaggaatattttgcttgtgtgtctagcggcaatagtaacgctaacagccgcgggccgagcttcagcagcggcctggtgccgttaagcttgcgcggcagccatatgggccctatggagatatacaagacagtgtctgcatggaagagacagccagtgcgggtactgagcctcttcagaaacatcgacaaggtactaaagagtttgggcttcttggaaagcggttctggttctgggggaggaacgctgaagtacgtggaagatgtcacaaatgtcgtgaggagagacgtggagaaatggggcccctttgacctggtgtacggctcgacgcagcccctaggcagctcttgtgatcgctgtcccggctggtacatgttccagttccaccggatcctgcagtatgcgctgcctcgccaggagagtcagcggcccttcttctggatattcatggacaatctgctgctgactgaggatgaccaagagacaactacccgcttccttcagacagaggctgtgaccctccaggatgtccgtggcagagactaccagaatgctatgcgggtgtggagcaacattccagggctgaagagcaagcatgcgcccctgaccccaaaggaagaagagtatctgcaagcccaagtcagaagcaggagcaagctggacgccccgaaagttgacctcctggtgaagaactgccttctcccgctgagagagtacttcaagtatttttctcaaaactcacttcctcttggagggccgagctctggcgcacccccaccaagtggagggtctcctgccgggtccccaacatctactgaagaaggcaccagcgaatccgcaacgcccgagtcaggccctggtacctccacagaaccatctgaaggtagtgcgcctggttccccagctggaagccctacttccaccgaagaaggcacgtcaaccgaaccaagtgaaggatctgcccctgggaccagcactgaaccatctgagccaaaaaagaagagaaaggtaatggacaagaagtacagcatcggcctggccatcggcaccaactctgtgggctgggccgtgatcaccgacgagtacaaggtgcccagcaagaaattcaaggtgctgggcaacaccgaccggcacagcatcaagaagaacctgatcggcgccctgctgttcgacagcggagaaacagccgaggccacccggctgaagagaaccgccagaagaagatacaccagacggaagaaccggatctgctatctgcaagagatcttcagcaacgagatggccaaggtggacgacagcttcttccacagactggaagagtccttcctggtggaagaggataagaagcacgagcggcaccccatcttcggcaacatcgtggacgaggtggcctaccacgagaagtaccccaccatctaccacctgagaaagaaactggtggacagcaccgacaaggccgacctgcggctgatctatctggccctggcccacatgatcaagttccggggccacttcctgatcgagggcgacctgaaccccgacaacagcgacgtggacaagctgttcatccagctggtgcagacctacaaccagctgttcgaggaaaaccccatcaacgccagcggcgtggacgccaaggccatcctgtctgccagactgagcaagagcagacggctggaaaatctgatcgcccagctgcccggcgagaagaagaatggcctgttcggcaacctgattgccctgagcctgggcctgacccccaacttcaagagcaacttcgacctggccgaggatgccaaactgcagctgagcaaggacacctacgacgacgacctggacaacctgctggcccagatcggcgaccagtacgccgacctgtttctggccgccaagaacctgtccgacgccatcctgctgagcgacatcctgagagtgaacaccgagatcaccaaggcccccctgagcgcctctatgatcaagagatacgacgagcaccaccaggacctgaccctgctgaaagctctcgtgcggcagcagctgcctgagaagtacaaagagattttcttcgaccagagcaagaacggctacgccggctacatcgatggcggagccagccaggaagagttctacaagttcatcaagcccatcctggaaaagatggacggcaccgaggaactgctcgtgaagctgaacagagaggacctgctgcggaagcagcggaccttcgacaacggcagcatcccccaccagatccacctgggagagctgcacgccattctgcggcggcaggaagatttttacccattcctgaaggacaaccgggaaaagatcgagaagatcctgaccttccgcatcccctactacgtgggccctctggccaggggaaacagcagattcgcctggatgaccagaaagagcgaggaaaccatcaccccctggaacttcgaggaagtggtggacaagggcgccagcgcccagagcttcatcgagcggatgaccaacttcgataagaacctgcccaacgagaaggtgctgcccaagcacagcctgctgtacgagtacttcaccgtgtacaacgagctgaccaaagtgaaatacgtgaccgagggaatgagaaagcccgccttcctgagcggcgagcagaaaaaagccatcgtggacctgctgttcaagaccaaccggaaagtgaccgtgaagcagctgaaagaggactacttcaagaaaatcgagtgcttcgactccgtggaaatctccggcgtggaagatcggttcaacgcctccctgggcacataccacgatctgctgaaaattatcaaggacaaggacttcctggacaatgaggaaaacgaggacattctggaagatatcgtgctgaccctgacactgtttgaggacagagagatgatcgaggaacggctgaaaacctatgcccacctgttcgacgacaaagtgatgaagcagctgaagcggcggagatacaccggctggggcaggctgagccggaagctgatcaacggcatccgggacaagcagtccggcaagacaatcctggatttcctgaagtccgacggcttcgccaacagaaacttcatgcagctgatccacgacgacagcctgacctttaaagaggacatccagaaagcccaggtgtccggccagggcgatagcctgcacgagcacattgccaatctggccggcagccccgccattaagaagggcatcctgcagacagtgaaggtggtggacgagctcgtgaaagtgatgggccggcacaagcccgagaacatcgtgatcgaaatggccagagagaaccagaccacccagaagggacagaagaacagccgcgagagaatgaagcggatcgaagagggcatcaaagagctgggcagccagatcctgaaagaacaccccgtggaaaacacccagctgcagaacgagaagctgtacctgtactacctgcagaatgggcgggatatgtacgtggaccaggaactggacatcaaccggctgtccgactacgatgtggacgctatcgtgcctcagagctttctgaaggacgactccatcgataacaaagtgctgactcggagcgacaagaaccggggcaagagcgacaacgtgccctccgaagaggtcgtgaagaagatgaagaactactggcgccagctgctgaatgccaagctgattacccagaggaagttcgacaatctgaccaaggccgagagaggcggcctgagcgaactggataaggccggcttcatcaagagacagctggtggaaacccggcagatcacaaagcacgtggcacagatcctggactcccggatgaacactaagtacgacgagaacgacaaactgatccgggaagtgaaagtgatcaccctgaagtccaagctggtgtccgatttccggaaggatttccagttttacaaagtgcgcgagatcaacaactaccaccacgcccacgacgcctacctgaacgccgtcgtgggaaccgccctgatcaaaaagtaccctaagctggaaagcgagttcgtgtacggcgactacaaggtgtacgacgtgcggaagatgatcgccaagagcgagcaggaaatcggcaaggctaccgccaagtacttcttctacagcaacatcatgaactttttcaagaccgagattaccctggccaacggcgagatccggaagcggcctctgatcgagacaaacggcgaaacaggcgagatcgtgtgggataagggccgggactttgccaccgtgcggaaagtgctgtctatgccccaagtgaatatcgtgaaaaagaccgaggtgcagacaggcggcttcagcaaagagtctatcctgcccaagaggaacagcgacaagctgatcgccagaaagaaggactgggaccctaagaagtacggcggcttcgacagccccaccgtggcctattctgtgctggtggtggccaaagtggaaaagggcaagtccaagaaactgaagagtgtgaaagagctgctggggatcaccatcatggaaagaagcagcttcgagaagaatcccatcgactttctggaagccaagggctacaaagaagtgaaaaaggacctgatcatcaagctgcctaagtactccctgttcgagctggaaaacggccggaagagaatgctggcctctgccggcgaactgcagaagggaaacgaactggccctgccctccaaatatgtgaacttcctgtacctggccagccactatgagaagctgaagggctcccccgaggataatgagcagaaacagctgtttgtggaacagcacaaacactacctggacgagatcatcgagcagatcagcgagttctccaagagagtgatcctggccgacgctaatctggacaaggtgctgagcgcctacaacaagcacagagacaagcctatcagagagcaggccgagaatatcatccacctgtttaccctgaccaatctgggagcccctgccgccttcaagtactttgacaccaccatcgaccggaagaggtacaccagcaccaaagaggtgctggacgccaccctgatccaccagagcatcaccggcctgtacgagacacggatcgacctgtctcagctgggaggcgacgcctatccctatgacgtgcccgattatgccagcctgggcagcggctcccccaagaaaaaacgcaaggtggaagatcctaagaaaaagcggaaagtggacggcctcgaggctactaacttcagcctgctgaagcaggctggagacgtggaggagaaccctggacctatgcattaatgagatcccaagcacgcagcaatgcagctcaaaacgcttagcctagccacacccccacgggaaacagcagtgattaacctttagcaataaacgaaagtttaactaagctatactaaccccagggttggtcaatttcgtgccagccacaccctggtactgcatgcacgcaatgctagctgcccctttcccgtcctgggcaccccgagtctcccccgaccccgggtcccaggtatgctcccacctccacctgccccactcaccacctctgctagttccagacacctccgagacgaggaaaaaaaaaaaaaaaaaaaaaaaaaaaaaaaaaaaaaaaaaaaaaaaaaaaaaaaaaaaaaaaaaaaaaaaaaaaaaaaaaaaaaaaaaaaaaaaaaaaaaaaaaaaaaaaaaaaaaaaaaaaaaaaaaaaaaaaaaaaaaaaaaaaaaaaaaaaaaaaaaaaaaaaaaaaaaaaaaaaaaaaaaaaaaaaaaaaaaaaaaaaaaaaaaaaaaaaaaaaaaaaaaaaaaaaaaaaaaaaaaaaaaaaaaaaaaaaaaaaaaaaaaaaaaaaaaaaaaaaaaaaaaaaaaaaaaaaaaaaaaaaaaaaaaaaaaaaaaaaaaaaaaaaaaaaaaaaaaaaaaaaaaaaaaaaaaaaaaaaaaaaaaaaaaaaaaaaaaaaaaaaaaaaaaaaaaaccgtcttcaagctttctagaaattcactggccgtcgttttacaacgtcgtgactgggaaaaccctggcgttacccaacttaatcgccttgcagcacatccccctttcgccagctggcgtaatagcgaagaggcccgcaccgatcgcccttcccaacagttgcgcagcctgaatggcgaatggcgcctgatgcggtattttctccttacgcatctgtgcggtatttcacaccgcatatggtgcactctcagtacaatctgctctgatgccgcatagttaagccagccccgacacccgccaacacccgctgacgcgccctgacgggcttgtctgctcccggcatccgcttacagacaagctgtgaccgtctccgggagctgcatgtgtcagaggttttcaccgtcatcaccgaaacgcgcgagacgaaagggcctcgtgatacgcctatttttataggttaatgtcatgataataatggtttcttagacgtcaggtggcacttttcggggaaatgtgcgcggaacccctatttgtttatttttctaaatacattcaaatatgtatccgctcatgagacaataaccctgataaatgcttcaataatattgaaaaaggaagagtatgagtattcaacatttccgtgtcgcccttattcccttttttgcggcattttgccttcctgtttttgctcacccagaaacgctggtgaaagtaaaagatgctgaagatcagttgggtgcacgagtgggttacatcgaactggatctcaacagcggtaagatccttgagagttttcgccccgaagaacgttttccaatgatgagcacttttaaagttctgctatgtggcgcggtattatcccgtattgacgccgggcaagagcaactcggtcgccgcatacactattctcagaatgacttggttgagtactcaccagtcacagaaaagcatcttacggatggcatgacagtaagagaattatgcagtgctgccataaccatgagtgataacactgcggccaacttacttctgacaacgatcggaggaccgaaggagctaaccgcttttttgcacaacatgggggatcatgtaactcgccttgatcgttgggaaccggagctgaatgaagccataccaaacgacgagcgtgacaccacgatgcctgtagcaatggcaacaacgttgcgcaaactattaactggcgaactacttactctagcttcccggcaacaattaatagactggatggaggcggataaagttgcaggaccacttctgcgctcggcccttccggctggctggtttattgctgataaatctggagccggtgagcgtgggtctcgcggtatcattgcagcactggggccagatggtaagccctcccgtatcgtagttatctacacgacggggagtcaggcaactatggatgaacgaaatagacagatcgctgagataggtgcctcactgattaagcattggtaactgtcagaccaagtttactcatatatactttagattgatttaaaacttcatttttaatttaaaaggatctaggtgaagatcctttttgataatctcatgaccaaaatcccttaacgtgagttttcgttccactgagcgtcagaccccgtagaaaagatcaaaggatcttcttgagatcctttttttctgcgcgtaatctgctgcttgcaaacaaaaaaaccaccgctaccagcggtggtttgtttgccggatcaagagctaccaactctttttccgaaggtaactggcttcagcagagcgcagataccaaatactgttcttctagtgtagccgtagttaggccaccacttcaagaactctgtagcaccgcctacatacctcgctctgctaatcctgttaccagtggctgctgccagtggcgataagtcgtgtcttaccgggttggactcaagacgatagttaccggataaggcgcagcggtcgggctgaacggggggttcgtgcacacagcccagcttggagcgaacgacctacaccgaactgagatacctacagcgtgagctatgagaaagcgccacgcttcccgaagggagaaaggcggacaggtatccggtaagcggcagggtcggaacaggagagcgcacgagggagcttccagggggaaacgcctggtatctttatagtcctgtcgggtttcgccacctctgacttgagcgtcgatttttgtgatgctcgtcaggggggcggagcctatggaaaaacgccagcaacgcggcctttttacggttcctggccttttgctggccttttgctcacatgttctttcctgcgttatcccctgattctgtggataaccgtattaccgcctttgagtgagctgataccgctcgccgcagccgaacgaccgagcgcagcgagtcagtgagcgaggaagcggaagagcgcccaatacgcaaaccgcctctccccgcgcgttggccgattcattaatgcagctggcacgacaggtttcccgactggaaagcgggcagtgagcgcaacgcaattaatgtgagttagctcactcattaggcaccccaggctttacactttatgcttccggctcgtatgttgtgtggaattgtgagcggataacaatttcacacaggaaacagctatgaccatgattacgcctctagaaagctttaatacgactcactataaggactcactatttgttttcgcgcccagttgcaaaaagtgtcgacatttgcttctgacacaactgtgttcactagcaacctcaaacagacacctta

SEQ ID NO: 129 - DNA, 9951 bp, synthetic construct
  misc_feature 1..9951: note = V9 DNA
  source 1..9951: mol_type = other DNA
ccttaacgtgagttttcgttccactgagcgtcagaccccgtagaaaagatcaaaggatcttcttgagatcctttttttctgcgcgtaatctgctgcttgcaaacaaaaaaaccaccgctaccagcggtggtttgtttgccggatcaagagctaccaactctttttccgaaggtaactggcttcagcagagcgcagataccaaatactgttcttctagtgtagccgtagttaggccaccacttcaagaactctgtagcaccgcctacatacctcgctctgctaatcctgttaccagtggctgctgccagtggcgataagtcgtgtcttaccgggttggactcaagacgatagttaccggataaggcgcagcggtcgggctgaacggggggttcgtgcacacagcccagcttggagcgaacgacctacaccgaactgagatacctacagcgtgagctatgagaaagcgccacgcttcccgaagggagaaaggcggacaggtatccggtaagcggcagggtcggaacaggagagcgcacgagggagcttccagggggaaacgcctggtatctttatagtcctgtcgggtttcgccacctctgacttgagcgtcgatttttgtgatgctcgtcaggggggcggagcctatggaaaaacgccagcaacgcggcctttttacggttcctggccttttgctggccttttgctcacatgttctttcctgcgttatcccctgattctgtggataaccgtattaccgcctttgagtgagctgataccgctcgccgcagccgaacgaccgagcgcagcgagtcagtgagcgaggaagcggaagagcgcccaatacgcaaaccgcctctccccgcgcgttggccgattcattaatgcagctggcacgacaggtttcccgactggaaagcgggcagtgagcgcaacgcaattaatgtgagttagctcactcattaggcaccccaggctttacactttatgcttccggctcgtatgttgtgtggaattgtgagcggataacaatttcacacaggaaacagctatgaccatgattacgcctctagaaagctttaatacgactcactataaggactcactatttgttttcgcgcccagttgcaaaaagtgtcgacatttgcttctgacacaactgtgttcactagcaacctcaaacagacaccgccaccatggtccctgctgctaagagagtgaaactggatggatccgacaagaagtacagcatcggcctggccatcggcaccaactctgtgggctgggccgtgatcaccgacgagtacaaggtgcccagcaagaaattcaaggtgctgggcaacaccgaccggcacagcatcaagaagaacctgatcggcgccctgctgttcgacagcggagaaacagccgaggccacccggctgaagagaaccgccagaagaagatacaccagacggaagaaccggatctgctatctgcaagagatcttcagcaacgagatggccaaggtggacgacagcttcttccacagactggaagagtccttcctggtggaagaggataagaagcacgagcggcaccccatcttcggcaacatcgtggacgaggtggcctaccacgagaagtaccccaccatctaccacctgagaaagaaactggtggacagcaccgacaaggccgacctgcggctgatctatctggccctggcccacatgatcaagttccggggccacttcctgatcgagggcgacctgaaccccgacaacagcgacgtggacaagctgttcatccagctggtgcagacctacaaccagctgttcgaggaaaaccccatcaacgccagcggcgtggacgccaaggccatcctgtctgccagactgagcaagagcagacggctggaaaatctgatcgcccagctgcccggcgagaagaagaatggcctgttcggcaacctgattgccctgagcctgggcctgacccccaacttcaagagcaacttcgacctggccgaggatgccaaactgcagctgagcaaggacacctacgacgacgacctggacaacctgctggcccagatcggcgaccagtacgccgacctgtttctggccgccaagaacctgtccgacgccatcctgctgagcgacatcctgagagtgaacaccgagatcaccaaggcccccctgagcgcctctatgatcaagagatacgacgagcaccaccaggacctgaccctgctgaaagctctcgtgcggcagcagctgcctgagaagtacaaagagattttcttcgaccagagcaagaacggctacgccggctacatcgatggcggagccagccaggaagagttctacaagttcatcaagcccatcctggaaaagatggacggcaccgaggaactgctcgtgaagctgaacagagaggacctgctgcggaagcagcggaccttcgacaacggcagcatcccccaccagatccacctgggagagctgcacgccattctgcggcggcaggaagatttttacccattcctgaaggacaaccgggaaaagatcgagaagatcctgaccttccgcatcccctactacgtgggccctctggccaggggaaacagcagattcgcctggatgaccagaaagagcgaggaaaccatcaccccctggaacttcgaggaagtggtggacaagggcgccagcgcccagagcttcatcgagcggatgaccaacttcgataagaacctgcccaacgagaaggtgctgcccaagcacagcctgctgtacgagtacttcaccgtgtacaacgagctgaccaaagtgaaatacgtgaccgagggaatgagaaagcccgccttcctgagcggcgagcagaaaaaagccatcgtggacctgctgttcaagaccaaccggaaagtgaccgtgaagcagctgaaagaggactacttcaagaaaatcgagtgcttcgactccgtggaaatctccggcgtggaagatcggttcaacgcctccctgggcacataccacgatctgctgaaaattatcaaggacaaggacttcctggacaatgaggaaaacgaggacattctggaagatatcgtgctgaccctgacactgtttgaggacagagagatgatcgaggaacggctgaaaacctatgcccacctgttcgacgacaaagtgatgaagcagctgaagcggcggagatacaccggctggggcaggctgagccggaagctgatcaacggcatccgggacaagcagtccggcaagacaatcctggatttcctgaagtccgacggcttcgccaacagaaacttcatgcagctgatccacgacgacagcctgacctttaaagaggacatccagaaagcccaggtgtccggccagggcgatagcctgcacgagcacattgccaatctggccggcagccccgccattaagaagggcatcctgcagacagtgaaggtggtggacgagctcgtgaaagtgatgggccggcacaagcccgagaacatcgtgatcgaaatggccagagagaaccagaccacccagaagggacagaagaacagccgcgagagaatgaagcggatcgaagagggcatcaaagagctgggcagccagatcctgaaagaacaccccgtggaaaacacccagctgcagaacgagaagctgtacctgtactacctgcagaatgggcgggatatgtacgtggaccaggaactggacatcaaccggctgtccgactacgatgtggacgctatcgtgcctcagagctttctgaaggacgactccatcgataacaaagtgctgactcggagcgacaagaaccggggcaagagcgacaacgtgccctccgaagaggtcgtgaagaagatgaagaactactggcgccagctgctgaatgccaagctgattacccagaggaagttcgacaatctgaccaaggccgagagaggcggcctgagcgaactggataaggccggcttcatcaagagacagctggtggaaacccggcagatcacaaagcacgtggcacagatcctggactcccggatgaacactaagtacgacgagaacgacaaactgatccgggaagtgaaagtgatcaccctgaagtccaagctggtgtccgatttccggaaggatttccagttttacaaagtgcgcgagatcaacaactaccaccacgcccacgacgcctacctgaacgccgtcgtgggaaccgccctgatcaaaaagtaccctaagctggaaagcgagttcgtgtacggcgactacaaggtgtacgacgtgcggaagatgatcgccaagagcgagcaggaaatcggcaaggctaccgccaagtacttcttctacagcaacatcatgaactttttcaagaccgagattaccctggccaacggcgagatccggaagcggcctctgatcgagacaaacggcgaaacaggcgagatcgtgtgggataagggccgggactttgccaccgtgcggaaagtgctgtctatgccccaagtgaatatcgtgaaaaagaccgaggtgcagacaggcggcttcagcaaagagtctatcctgcccaagaggaacagcgacaagctgatcgccagaaagaaggactgggaccctaagaagtacggcggcttcgacagccccaccgtggcctattctgtgctggtggtggccaaagtggaaaagggcaagtccaagaaactgaagagtgtgaaagagctgctggggatcaccatcatggaaagaagcagcttcgagaagaatcccatcgactttctggaagccaagggctacaaagaagtgaaaaaggacctgatcatcaagctgcctaagtactccctgttcgagctggaaaacggccggaagagaatgctggcctctgccggcgaactgcagaagggaaacgaactggccctgccctccaaatatgtgaacttcctgtacctggccagccactatgagaagctgaagggctcccccgaggataatgagcagaaacagctgtttgtggaacagcacaaacactacctggacgagatcatcgagcagatcagcgagttctccaagagagtgatcctggccgacgctaatctggacaaggtgctgagcgcctacaacaagcacagagacaagcctatcagagagcaggccgagaatatcatccacctgtttaccctgaccaatctgggagcccctgccgccttcaagtactttgacaccaccatcgaccggaagaggtacaccagcaccaaagaggtgctggacgccaccctgatccaccagagcatcaccggcctgtacgagacacggatcgacctgtctcagctgggaggcgacgcctatccctatgacgtgcccgattatgccagcctgggcagcggctcccccaagaaaaaacgcaaggtggaagatcctaagaaaaagcggaaagtggacggcggagggccgagctctggcgcacccccaccaagtggagggtctcctgccgggtccccaacatctactgaagaaggcaccagcgaatccgcaacgcccgagtcaggccctggtacctccacagaaccatctgaaggtagtgcgcctggttccccagctggaagccctacttccaccgaagaaggcacgtcaaccgaaccaagtgaaggatctgcccctgggaccagcactgaaccatctgagatgaaccatgaccaggaatttgaccccccaaaggtttacccacctgtgccagctgagaagaggaagcccatccgcgtgctgtctctctttgatgggattgctacagggctcctggtgctgaaggacctgggcatccaagtggaccgctacattgcctccgaggtgtgtgaggactccatcacggtgggcatggtgcggcaccagggaaagatcatgtacgtcggggacgtccgcagcgtcacacagaagcatatccaggagtggggcccattcgacctggtgattggaggcagtccctgcaatgacctctccattgtcaaccctgcccgcaagggactttatgagggtactggccgcctcttctttgagttctaccgcctcctgcatgatgcgcggcccaaggagggagatgatcgccccttcttctggctctttgagaatgtggtggccatgggcgttagtgacaagagggacatctcgcgatttcttgagtctaaccccgtgatgattgacgccaaagaagtgtctgctgcacacagggcccgttacttctggggtaaccttcctggcatgaacaggcctttggcatccactgtgaatgataagctggagctgcaagagtgtctggagcacggcagaatagccaagttcagcaaagtgaggaccattaccaccaggtcaaactctataaagcagggcaaagaccagcatttccccgtcttcatgaacgagaaggaggacatcctgtggtgcactgaaatggaaagggtgtttggcttccccgtccactacacagacgtctccaacatgagccgcttggcgaggcagagactgctgggccgatcgtggagcgtgccggtcatccgccacctcttcgctccgctgaaggaatattttgcttgtgtgtctagcggcaatagtaacgctaacagccgcgggccgagcttcagcagcggcctggtgccgttaagcttgcgcggcagccatatgggccctatggagatatacaagacagtgtctgcatggaagagacagccagtgcgggtactgagcctcttcagaaacatcgacaaggtactaaagagtttgggcttcttggaaagcggttctggttctgggggaggaacgctgaagtacgtggaagatgtcacaaatgtcgtgaggagagacgtggagaaatggggcccctttgacctggtgtacggctcgacgcagcccctaggcagctcttgtgatcgctgtcccggctggtacatgttccagttccaccggatcctgcagtatgcgctgcctcgccaggagagtcagcggcccttcttctggatattcatggacaatctgctgctgactgaggatgaccaagagacaactacccgcttccttcagacagaggctgtgaccctccaggatgtccgtggcagagactaccagaatgctatgcgggtgtggagcaacattccagggctgaagagcaagcatgcgcccctgaccccaaaggaagaagagtatctgcaagcccaagtcagaagcaggagcaagctggacgccccgaaagttgacctcctggtgaagaactgccttctcccgctgagagagtacttcaagtatttttctcaaaactcacttcctcttgacggcagcggcagcgagacccccggtaccagcgagagcgccacccccgagagcatgaacaattcccagggaagagtgaccttcgaggatgtcactgtgaacttcacccagggggagtggcagcggctgaatcccgaacagagaaacttgtacagggatgtgatgctggagaattacagcaaccttgtctctgtgggacaaggggaaaccaccaaacccgatgtgatcttgaggttggaacaaggaaaggagccatggttggaggaagaggaagtgctgggaagtggccgtgcagaaaaaaatggggacattggagggcagatttggaagccaaaggatgtgaaagagagtctcctcgagtgataatagggatcccaagcacgcagcaatgcagctcaaaacgcttagcctagccacacccccacgggaaacagcagtgattaacctttagcaataaacgaaagtttaactaagctatactaaccccagggttggtcaatttcgtgccagccacaccctggtactgcatgcacgcaatgctagctgcccctttcccgtcctgggcaccccgagtctcccccgaccccgggtcccaggtatgctcccacctccacctgccccactcaccacctctgctagttccagacacctccgaagatggaaaaaaaaaaaaaaaaaaaaaaaaaaaaaaaaaaaaaaaaaaaaaaaaaaaaaaaaaaaaaaaaaaaaaaaaaaaaaaaaaaaaaaaaaaaaaaaaaaaaaaaaaaaaaaaaaaaaaaaaaaaaaaaaaaaaaaaaaaaaaaaaaaaaaaaaaaaaaaaaaaaaaaaaaaaaaaaaaaaaaaaaaaaaaaaaaaaaaaaaaaaaaaaaaaaaaaaaaaaaaaaaaaaaaaaaaaaaaaaaaaaaaaaaaaaaaaaaaaaaaaaaaaaaaaaaaaaaaaaaaaaaaaaaaaaaaaaaaaaaaaaaaaaaaaaaaaaaaaaaaaaaaaaaaaaaaaaaaaaaaaaaaaaaaaaaaaaaaaaaaaaaaaaaaaaaaaaaaaaaaaaaaaaaaaaaaaccgtcttcaagctttctagaaattcactggccgtcgttttacaacgtcgtgactgggaaaaccctggcgttacccaacttaatcgccttgcagcacatccccctttcgccagctggcgtaatagcgaagaggcccgcaccgatcgcccttcccaacagttgcgcagcctgaatggcgaatggcgcctgatgcggtattttctccttacgcatctgtgcggtatttcacaccgcatatggtgcactctcagtacaatctgctctgatgccgcatagttaagccagccccgacacccgccaacacccgctgacgcgccctgacgggcttgtctgctcccggcatccgcttacagacaagctgtgaccgtctccgggagctgcatgtgtcagaggttttcaccgtcatcaccgaaacgcgcgagacgaaagggcctcgtgatacgcctatttttataggttaatgtcatgataataatggtttcttagacgtcaggtggcacttttcggggaaatgtgcgcggaacccctatttgtttatttttctaaatacattcaaatatgtatccgctcatgagacaataaccctgataaatgcttcaataatattgaaaaaggaagagtatgagtattcaacatttccgtgtcgcccttattcccttttttgcggcattttgccttcctgtttttgctcacccagaaacgctggtgaaagtaaaagatgctgaagatcagttgggtgcacgagtgggttacatcgaactggatctcaacagcggtaagatccttgagagttttcgccccgaagaacgttttccaatgatgagcacttttaaagttctgctatgtggcgcggtattatcccgtattgacgccgggcaagagcaactcggtcgccgcatacactattctcagaatgacttggttgagtactcaccagtcacagaaaagcatcttacggatggcatgacagtaagagaattatgcagtgctgccataaccatgagtgataacactgcggccaacttacttctgacaacgatcggaggaccgaaggagctaaccgcttttttgcacaacatgggggatcatgtaactcgccttgatcgttgggaaccggagctgaatgaagccataccaaacgacgagcgtgacaccacgatgcctgtagcaatggcaacaacgttgcgcaaactattaactggcgaactacttactctagcttcccggcaacaattaatagactggatggaggcggataaagttgcaggaccacttctgcgctcggcccttccggctggctggtttattgctgataaatctggagccggtgagcgtgggtcacgcggtatcattgcagcactggggccagatggtaagccctcccgtatcgtagttatctacacgacggggagtcaggcaactatggatgaacgaaatagacagatcgctgagataggtgcctcactgattaagcattggtaactgtcagaccaagtttactcatatatactttagattgatttaaaacttcatttttaatttaaaaggatctaggtgaagatcctttttgataatctcatgaccaaaatc

SEQ ID NO: 130 - DNA, 14760 bp, synthetic construct
  misc_feature 1..14760: note = V10 DNA
  source 1..14760: mol_type = other DNA
acgcgtgtagtcttatgcaatactcttgtagtcttgcaacatggtaacgatgagttagcaacatgccttacaaggagagaaaaagcaccgtgcatgccgattggtggaagtaaggtggtacgatcgtgccttattaggaaggcaacagacgggtctgacatggattggacgaaccactgaattgccgcattgcagagatattgtatttaagtgcctagctcgatacaataaacgggtctctctggttagaccagatctgagcctgggagctctctggctaactagggaacccactgcttaagcctcaataaagcttgccttgagtgcttcaagtagtgtgtgcccgtctgttgtgtgactctggtaactagagatccctcagacccttttagtcagtgtggaaaatctctagcagtggcgcccgaacagggacctgaaagcgaaagggaaaccagagctctctcgacgcaggactcggcttgctgaagcgcgcacggcaagaggcgaggggcggcgactggtgagtacgccaaaaattttgactagcggaggctagaaggagagagatgggtgcgagagcgtcagtattaagcgggggagaattagatcgcgatgggaaaaaattcggttaaggccagggggaaagaaaaaatataaattaaaacatatagtatgggcaagcagggagctagaacgattcgcagttaatcctggcctgttagaaacatcagaaggctgtagacaaatactgggacagctacaaccatcccttcagacaggatcagaagaacttagatcattatataatacagtagcaaccctctattgtgtgcatcaaaggatagagataaaagacaccaaggaagctttagacaagatagaggaagagcaaaacaaaagtaagaccaccgcacagcaagcggccactgatcttcagacctggaggaggagatatgagggacaattggagaagtgaattatataaatataaagtagtaaaaattgaaccattaggagtagcacccaccaaggcaaagagaagagtggtgcagagagaaaaaagagcagtgggaataggagctttgttccttgggttcttgggagcagcaggaagcactatgggcgcagcctcaatgacgctgacggtacaggccagacaattattgtctggtatagtgcagcagcagaacaatttgctgagggctattgaggcgcaacagcatctgttgcaactcacagtctggggcatcaagcagctccaggcaagaatcctggctgtggaaagatacctaaaggatcaacagctcctggggatttggggttgctctggaaaactcatttgcaccactgctgtgccttggaatgctagttggagtaataaatctctggaacagattggaatcacacgacctggatggagtgggacagagaaattaacaattacacaagcttaatacactccttaattgaagaatcgcaaaaccagcaagaaaagaatgaacaagaattattggaattagataaatgggcaagtttgtggaattggtttaacataacaaattggctgtggtatataaaattattcataatgatagtaggaggcttggtaggtttaagaatagtttttgctgtactttctatagtgaatagagttaggcagggatattcaccattatcgtttcagacccacctcccaaccccgaggggacccgacaggcccgaaggaatagaagaagaaggtggagagagagacagagacagatccattcgattagtgaacggatctcgacggttaacttttaaaagaaaaggggggattggggggtacagtgcaggggaaagaatagtagacataatagcaacagacatacaaactaaagaattacaaaaacaaattacaaaaattcaaaattttatcgatactagtggcgcgccggattcgacattgattattgactagttattaatagtaatcaattacggggtcattagttcatagcccatatatggagttccgcgttacataacttacggtaaatggcccgcctggctgaccgcccaacgacccccgcccattgacgtcaataatgacgtatgttcccatagtaacgccaatagggactttccattgacgtcaatgggtggagtatttacggtaaactgcccacttggcagtacatcaagtgtatcatatgccaagtacgccccctattgacgtcaatgacggtaaatggcccgcctggcattatgcccagtacatgaccttatgggactttcctacttggcagtacatctacgtattagtcatcgctattaccatggtcgaggtgagccccacgttctgcttcactctccccatctcccccccctccccacccccaattttgtatttatttattttttaattattttgtgcagcgatgggggcggggggggggggggggcgcgcgccaggcggggcggggcggggcgaggggcggggcggggcgaggcggagaggtgcggcggcagccaatcagagcggcgcgctccgaaagtttccttttatggcgaggcggcggcggcggcggccctataaaaagcgaagcgcgcggcgggcgggagtcgctgcgttgccttcgccccgtgccccgctccgcgccgcctcgcgccgcccgccccggctctgactgaccgcgttactcccacaggtgagcgggcgggacggcccttctcctccgggctgtaattagcgcttggtttaatgacggctcgtttcttttctgtggctgcgtgaaagccttaaagggctccgggagggccctttgtgcgggggggagcggctcggggggtgcgtgcgtgtgtgtgtgcgtggggagcgccgcgtgcggcccgcgctgcccggcggctgtgagcgctgcgggcgcggcgcggggctttgtgcgctccgcgtgtgcgcgaggggagcgcggccgggggcggtgccccgcggtgcgggggggctgcgaggggaacaaaggctgcgtgcggggtgtgtgcgtgggggggtgagcagggggtgtgggcgcggcggtcgggctgtaacccccccctgcacccccctccccgagttgctgagcacggcccggcttcgggtgcggggctccgtgcggggcgtggcgcggggctcgccgtgccgggcggggggtggcggcaggtgggggtgccgggcggggcggggccgcctcgggccggggagggctcgggggaggggcgcggcggccccggagcgccggcggctgtcgaggcgcggcgagccgcagccattgccttttatggtaatcgtgcgagagggcgcagggacttcctttgtcccaaatctggcggagccgaaatctgggaggcgccgccgcaccccctctagcgggcgcgggcgaagcggtgcggcgccggcaggaaggaaatgggcggggagggccttcgtgcgtcgccgcgccgccgtccccttctccatctccagcctcggggctgccgcagggggacggctgccttcgggggggacggggcagggcggggttcggcttctggcgtgtgaccggcggctctagagcctctgctaaccatgttcatgccttcttctttttcctacagatccttaattaagccaccatgccaaaaaagaagagaaaggtaatggacaagaagtacagcatcggcctggccatcggcaccaactctgtgggctgggccgtgatcaccgacgagtacaaggtgcccagcaagaaattcaaggtgctgggcaacaccgaccggcacagcatcaagaagaacctgatcggcgccctgctgttcgacagcggagaaacagccgaggccacccggctgaagagaaccgccagaagaagatacaccagacggaagaaccggatctgctatctgcaagagatcttcagcaacgagatggccaaggtggacgacagcttcttccacagactggaagagtccttcctggtggaagaggataagaagcacgagcggcaccccatcttcggcaacatcgtggacgaggtggcctaccacgagaagtaccccaccatctaccacctgagaaagaaactggtggacagcaccgacaaggccgacctgcggctgatctatctggccctggcccacatgatcaagttccggggccacttcctgatcgagggcgacctgaaccccgacaacagcgacgtggacaagctgttcatccagctggtgcagacctacaaccagctgttcgaggaaaaccccatcaacgccagcggcgtggacgccaaggccatcctgtctgccagactgagcaagagcagacggctggaaaatctgatcgcccagctgcccggcgagaagaagaatggcctgttcggcaacctgattgccctgagcctgggcctgacccccaacttcaagagcaacttcgacctggccgaggatgccaaactgcagctgagcaaggacacctacgacgacgacctggacaacctgctggcccagatcggcgaccagtacgccgacctgtttctggccgccaagaacctgtccgacgccatcctgctgagcgacatcctgagagtgaacaccgagatcaccaaggcccccctgagcgcctctatgatcaagagatacgacgagcaccaccaggacctgaccctgctgaaagctctcgtgcggcagcagctgcctgagaagtacaaagagattttcttcgaccagagcaagaacggctacgccggctacatcgatggcggagccagccaggaagagttctacaagttcatcaagcccatcctggaaaagatggacggcaccgaggaactgctcgtgaagctgaacagagaggacctgctgcggaagcagcggaccttcgacaacggcagcatcccccaccagatccacctgggagagctgcacgccattctgcggcggcaggaagatttttacccattcctgaaggacaaccgggaaaagatcgagaagatcctgaccttccgcatcccctactacgtgggccctctggccaggggaaacagcagattcgcctggatgaccagaaagagcgaggaaaccatcaccccctggaacttcgaggaagtggtggacaagggcgccagcgcccagagcttcatcgagcggatgaccaacttcgataagaacctgcccaacgagaaggtgctgcccaagcacagcctgctgtacgagtacttcaccgtgtacaacgagctgaccaaagtgaaatacgtgaccgagggaatgagaaagcccgccttcctgagcggcgagcagaaaaaagccatcgtggacctgctgttcaagaccaaccggaaagtgaccgtgaagcagctgaaagaggactacttcaagaaaatcgagtgcttcgactccgtggaaatctccggcgtggaagatcggttcaacgcctccctgggcacataccacgatctgctgaaaattatcaaggacaaggacttcctggacaatgaggaaaacgaggacattctggaagatatcgtgctgaccctgacactgtttgaggacagagagatgatcgaggaacggctgaaaacctatgcccacctgttcgacgacaaagtgatgaagcagctgaagcggcggagatacaccggctggggcaggctgagccggaagctgatcaacggcatccgggacaagcagtccggcaagacaatcctggatttcctgaagtccgacggcttcgccaacagaaacttcatgcagctgatccacgacgacagcctgacctttaaagaggacatccagaaagcccaggtgtccggccagggcgatagcctgcacgagcacattgccaatctggccggcagccccgccattaagaagggcatcctgcagacagtgaaggtggtggacgagctcgtgaaagtgatgggccggcacaagcccgagaacatcgtgatcgaaatggccagagagaaccagaccacccagaagggacagaagaacagccgcgagagaatgaagcggatcgaagagggcatcaaagagctgggcagccagatcctgaaagaacaccccgtggaaaacacccagctgcagaacgagaagctgtacctgtactacctgcagaatgggcgggatatgtacgtggaccaggaactggacatcaaccggctgtccgactacgatgtggacgctatcgtgcctcagagctttctgaaggacgactccatcgataacaaagtgctgactcggagcgacaagaaccggggcaagagcgacaacgtgccctccgaagaggtcgtgaagaagatgaagaactactggcgccagctgctgaatgccaagctgattacccagaggaagttcgacaatctgaccaaggccgagagaggcggcctgagcgaactggataaggccggcttcatcaagagacagctggtggaaacccggcagatcacaaagcacgtggcacagatcctggactcccggatgaacactaagtacgacgagaacgacaaactgatccgggaagtgaaagtgatcaccctgaagtccaagctggtgtccgatttccggaaggatttccagttttacaaagtgcgcgagatcaacaactaccaccacgcccacgacgcctacctgaacgccgtcgtgggaaccgccctgatcaaaaagtaccctaagctggaaagcgagttcgtgtacggcgactacaaggtgtacgacgtgcggaagatgatcgccaagagcgagcaggaaatcggcaaggctaccgccaagtacttcttctacagcaacatcatgaactttttcaagaccgagattaccctggccaacggcgagatccggaagcggcctctgatcgagacaaacggcgaaacaggcgagatcgtgtgggataagggccgggactttgccaccgtgcggaaagtgctgtctatgccccaagtgaatatcgtgaaaaagaccgaggtgcagacaggcggcttcagcaaagagtctatcctgcccaagaggaacagcgacaagctgatcgccagaaagaaggactgggaccctaagaagtacggcggcttcgacagccccaccgtggcctattctgtgctggtggtggccaaagtggaaaagggcaagtccaagaaactgaagagtgtgaaagagctgctggggatcaccatcatggaaagaagcagcttcgagaagaatcccatcgactttctggaagccaagggctacaaagaagtgaaaaaggacctgatcatcaagctgcctaagtactccctgttcgagctggaaaacggccggaagagaatgctggcctctgccggcgaactgcagaagggaaacgaactggccctgccctccaaatatgtgaacttcctgtacctggccagccactatgagaagctgaagggctcccccgaggataatgagcagaaacagctgtttgtggaacagcacaaacactacctggacgagatcatcgagcagatcagcgagttctccaagagagtgatcctggccgacgctaatctggacaaggtgctgagcgcctacaacaagcacagagacaagcctatcagagagcaggccgagaatatcatccacctgtttaccctgaccaatctgggagcccctgccgccttcaagtactttgacaccaccatcgaccggaagaggtacaccagcaccaaagaggtgctggacgccaccctgatccaccagagcatcaccggcctgtacgagacacggatcgacctgtctcagctgggaggcgacgcctatccctatgacgtgcccgattatgccagcctgggcagcggctcccccaagaaaaaacgcaaggtggaagatcctaagaaaaagcggaaagtggacggcggagggccgagctctggcgcacccccaccaagtggagggtctcctgccgggtccccaacatctactgaagaaggcaccagcgaatccgcaacgcccgagtcaggccctggtacctccacagaaccatctgaaggtagtgcgcctggttccccagctggaagccctacttccaccgaagaaggcacgtcaaccgaaccaagtgaaggatctgcccctgggaccagcactgaaccatctgagatgaacaattcccagggaagagtgaccttcgaggatgtcactgtgaacttcacccagggggagtggcagcggctgaatcccgaacagagaaacttgtacagggatgtgatgctggagaattacagcaaccttgtctctgtgggacaaggggaaaccaccaaacccgatgtgatcttgaggttggaacaaggaaaggagccatggttggaggaagaggaagtgctgggaagtggccgtgcagaaaaaaatggggacattggagggcagatttggaagccaaaggatgtgaaagagagtctcagcggcagcgagacccccggtaccagcgagagcgccacccccgagagcatgaaccatgaccaggaatttgaccccccaaaggtttacccacctgtgccagctgagaagaggaagcccatccgcgtgctgtctctctttgatgggattgctacagggctcctggtgctgaaggacctgggcatccaagtggaccgctacattgcctccgaggtgtgtgaggactccatcacggtgggcatggtgcggcaccagggaaagatcatgtacgtcggggacgtccgcagcgtcacacagaagcatatccaggagtggggcccattcgacctggtgattggaggcagtccctgcaatgacctctccattgtcaaccctgcccgcaagggactttatgagggtactggccgcctcttctttgagttctaccgcctcctgcatgatgcgcggcccaaggagggagatgatcgccccttcttctggctctttgagaatgtggtggccatgggcgttagtgacaagagggacatctcgcgatttcttgagtctaaccccgtgatgattgacgccaaagaagtgtctgctgcacacagggcccgttacttctggggtaaccttcctggcatgaacaggcctttggcatccactgtgaatgataagctggagctgcaagagtgtctggagcacggcagaatagccaagttcagcaaagtgaggaccattaccaccaggtcaaactctataaagcagggcaaagaccagcatttccccgtcttcatgaacgagaaggaggacatcctgtggtgcactgaaatggaaagggtgtttggcttccccgtccactacacagacgtctccaacatgagccgcttggcgaggcagagactgctgggccgatcgtggagcgtgccggtcatccgccacctcttcgctccgctgaaggaatattttgcttgtgtgtctagcggcaatagtaacgctaacagccgcgggccgagcttcagcagcggcctggtgccgttaagcttgcgcggcagccatatgggccctatggagatatacaagacagtgtctgcatggaagagacagccagtgcgggtactgagcctcttcagaaacatcgacaaggtactaaagagtttgggcttcttggaaagcggttctggttctgggggaggaacgctgaagtacgtggaagatgtcacaaatgtcgtgaggagagacgtggagaaatggggcccctttgacctggtgtacggctcgacgcagcccctaggcagctcttgtgatcgctgtcccggctggtacatgttccagttccaccggatcctgcagtatgcgctgcctcgccaggagagtcagcggcccttcttctggatattcatggacaatctgctgctgactgaggatgaccaagagacaactacccgcttccttcagacagaggctgtgaccctccaggatgtccgtggcagagactaccagaatgctatgcgggtgtggagcaacattccagggctgaagagcaagcatgcgcccctgaccccaaaggaagaagagtatctgcaagcccaagtcagaagcaggagcaagctggacgccccgaaagttgacctcctggtgaagaactgccttctcccgctgagagagtacttcaagtatttttctcaaaactcacttcctcttctcgaggctactaacttcagcctgctgaagcaggctggagacgtggaggagaaccctggacctatgcatgtgagcgagctgattaaggagaacatgcacatgaagctgtacatggagggcaccgtggacaaccatcacttcaagtgcacatccgagggcgaaggcaagccctacgagggcacccagaccatgagaatcaaggtggtcgagggcggccctctccccttcgccttcgacatcctggctactagcttcctctacggcagcaagaccttcatcaaccacacccagggcatccccgacttcttcaagcagtccttccctgagggcttcacatgggagagagtcaccacatacgaagacgggggcgtgctgaccgctacccaggacaccagcctccaggacggctgcctcatctacaacgtcaagatcagaggggtgaacttcacatccaacggccctgtgatgcagaagaaaacactcggctgggaggccttcaccgaaacgctgtaccccgctgacggcggcctggaaggcagaaacgacatggccctgaagctcgtgggcgggagccatctgatcgcaaacatcaagaccacatatagatccaagaaacccgctaagaacctcaagatgcctggcgtctactatgtggactacagactggaaagaatcaaggaggccaacaacgagacctacgtcgagcagcacgaggtggcagtggccagatactgcgacctccctagcaaactggggcacaagcttaattaagtcgacaatcaacctctggattacaaaatttgtgaaagattgactggtattcttaactatgttgctccttttacgctatgtggatacgctgctttaatgcctttgtatcatgctattgcttcccgtatggctttcattttctcctccttgtataaatcctggttgctgtctctttatgaggagttgtggcccgttgtcaggcaacgtggcgtggtgtgcactgtgtttgctgacgcaacccccactggttggggcattgccaccacctgtcagctcctttccgggactttcgctttccccctccctattgccacggcggaactcatcgccgcctgccttgcccgctgctggacaggggctcggctgttgggcactgacaattccgtggtgttgtcggggaaatcatcgtcctttccttggctgctcgcctgtgttgccacctggattctgcgcgggacgtccttctgctacgtcccttcggccctcaatccagcggaccttccttcccgcggcctgctgccggctctgcggcctcttccgcgtcttcgccttcgccctcagacgagtcggatctccctttgggccgcctccccgcctggtacctttaagaccaatgacttacaaggcagctgtagatcttagccactttttaaaagaaaaggggggactggaagggctaattcactcccaacgaaaataagatctgctttttgcttgtactgggtctctctggttagaccagatctgagcctgggagctctctggctaactagggaacccactgcttaagcctcaataaagcttgccttgagtgcttcaagtagtgtgtgcccgtctgttgtgtgactctggtaactagagatccctcagacccttttagtcagtgtggaaaatctctagcagtagtagttcatgtcatcttattattcagtatttataacttgcaaagaaatgaatatcagagagtgagaggaacttgtttattgcagcttataatggttacaaataaagcaatagcatcacaaatttcacaaataaagcatttttttcactgcattctagttgtggtttgtccaaactcatcaatgtatcttatcatgtctggctctagctatcccgcccctaactccgcccagttccgcccattctccgccccatggctgactaattttttttatttatgcagaggccgaggccgcctcggcctctgagctattccagaagtagtgaggaggcttttttggaggcctagacttttgcagagacggcccaaattcgtaatcatggtcatagctgtttcctgtgtgaaattgttatccgctcacaattccacacaacatacgagccggaagcataaagtgtaaagcctggggtgcctaatgagtgagctaactcacattaattgcgttgcgctcactgcccgctttccagtcgggaaacctgtcgtgccagctgcattaatgaatcggccaacgcgcggggagaggcggtttgcgtattgggcgctcttccgcttcctcgctcactgactcgctgcgctcggtcgttcggctgcggcgagcggtatcagctcactcaaaggcggtaatacggttatccacagaatcaggggataacgcaggaaagaacatgtgagcaaaaggccagcaaaaggccaggaaccgtaaaaaggccgcgttgctggcgtttttccataggctccgcccccctgacgagcatcacaaaaatcgacgctcaagtcagaggtggcgaaacccgacaggactataaagataccaggcgtttccccctggaagctccctcgtgcgctctcctgttccgaccctgccgcttaccggatacctgtccgcctttctcccttcgggaagcgtggcgctttctcatagctcacgctgtaggtatctcagttcggtgtaggtcgttcgctccaagctgggctgtgtgcacgaaccccccgttcagcccgaccgctgcgccttatccggtaactatcgtcttgagtccaacccggtaagacacgacttatcgccactggcagcagccactggtaacaggattagcagagcgaggtatgtaggcggtgctacagagttcttgaagtggtggcctaactacggctacactagaaggacagtatttggtatctgcgctctgctgaagccagttaccttcggaaaaagagttggtagctcttgatccggcaaacaaaccaccgctggtagcggtggtttttttgtttgcaagcagcagattacgcgcagaaaaaaaggatctcaagaagatcctttgatcttttctacggggtctgacgctcagtggaacgaaaactcacgttaagggattttggtcatgagattatcaaaaaggatcttcacctagatccttttaaattaaaaatgaagttttaaatcaatctaaagtatatatgagtaaacttggtctgacagttaccaatgcttaatcagtgaggcacctatctcagcgatctgtctatttcgttcatccatagttgcctgactccccgtcgtgtagataactacgatacgggagggcttaccatctggccccagtgctgcaatgataccgcgagacccacgctcaccggctccagatttatcagcaataaaccagccagccggaagggccgagcgcagaagtggtcctgcaactttatccgcctccatccagtctattaattgttgccgggaagctagagtaagtagttcgccagttaatagtttgcgcaacgttgttgccattgctacaggcatcgtggtgtcacgctcgtcgtttggtatggcttcattcagctccggttcccaacgatcaaggcgagttacatgatcccccatgttgtgcaaaaaagcggttagctccttcggtcctccgatcgttgtcagaagtaagttggccgcagtgttatcactcatggttatggcagcactgcataattctcttactgtcatgccatccgtaagatgcttttctgtgactggtgagtactcaaccaagtcattctgagaatagtgtatgcggcgaccgagttgctcttgcccggcgtcaatacgggataataccgcgccacatagcagaactttaaaagtgctcatcattggaaaacgttcttcggggcgaaaactctcaaggatcttaccgctgttgagatccagttcgatgtaacccactcgtgcacccaactgatcttcagcatcttttactttcaccagcgtttctgggtgagcaaaaacaggaaggcaaaatgccgcaaaaaagggaataagggcgacacggaaatgttgaatactcatactcttcctttttcaatattattgaagcatttatcagggttattgtctcatgagcggatacatatttgaatgtatttagaaaaataaacaaataggggttccgcgcacatttccccgaaaagtgccacctgacgtctaagaaaccattattatcatgacattaacctataaaaataggcgtatcacgaggccctttcgtctcgcgcgtttcggtgatgacggtgaaaacctctgacacatgcagctcccggagacggtcacagcttgtctgtaagcggatgccgggagcagacaagcccgtcagggcgcgtcagcgggtgttggcgggtgtcggggctggcttaactatgcggcatcagagcagattgtactgagagtgcaccatatgcggtgtgaaataccgcacagatgcgtaaggagaaaataccgcatcaggcgccattcgccattcaggctgcgcaactgttgggaagggcgatcggtgcgggcctcttcgctattacgccagctggcgaaagggggatgtgctgcaaggcgattaagttgggtaacgccagggttttcccagtcacgacgttgtaaaacgacggccagtgccaagctg

SEQ ID NO: 131 - DNA, 14760 bp, synthetic construct
  misc_feature 1..14760: note = V11 DNA
  source 1..14760: mol_type = other DNA
acgcgtgtagtcttatgcaatactcttgtagtcttgcaacatggtaacgatgagttagcaacatgccttacaaggagagaaaaagcaccgtgcatgccgattggtggaagtaaggtggtacgatcgtgccttattaggaaggcaacagacgggtctgacatggattggacgaaccactgaattgccgcattgcagagatattgtatttaagtgcctagctcgatacaataaacgggtctctctggttagaccagatctgagcctgggagctctctggctaactagggaacccactgcttaagcctcaataaagcttgccttgagtgcttcaagtagtgtgtgcccgtctgttgtgtgactctggtaactagagatccctcagacccttttagtcagtgtggaaaatctctagcagtggcgcccgaacagggacctgaaagcgaaagggaaaccagagctctctcgacgcaggactcggcttgctgaagcgcgcacggcaagaggcgaggggcggcgactggtgagtacgccaaaaattttgactagcggaggctagaaggagagagatgggtgcgagagcgtcagtattaagcgggggagaattagatcgcgatgggaaaaaattcggttaaggccagggggaaagaaaaaatataaattaaaacatatagtatgggcaagcagggagctagaacgattcgcagttaatcctggcctgttagaaacatcagaaggctgtagacaaatactgggacagctacaaccatcccttcagacaggatcagaagaacttagatcattatataatacagtagcaaccctctattgtgtgcatcaaaggatagagataaaagacaccaaggaagctttagacaagatagaggaagagcaaaacaaaagtaagaccaccgcacagcaagcggccactgatcttcagacctggaggaggagatatgagggacaattggagaagtgaattatataaatataaagtagtaaaaattgaaccattaggagtagcacccaccaaggcaaagagaagagtggtgcagagagaaaaaagagcagtgggaataggagctttgttccttgggttcttgggagcagcaggaagcactatgggcgcagcctcaatgacgctgacggtacaggccagacaattattgtctggtatagtgcagcagcagaacaatttgctgagggctattgaggcgcaacagcatctgttgcaactcacagtctggggcatcaagcagctccaggcaagaatcctggctgtggaaagatacctaaaggatcaacagctcctggggatttggggttgctctggaaaactcatttgcaccactgctgtgccttggaatgctagttggagtaataaatctctggaacagattggaatcacacgacctggatggagtgggacagagaaattaacaattacacaagcttaatacactccttaattgaagaatcgcaaaaccagcaagaaaagaatgaacaagaattattggaattagataaatgggcaagtttgtggaattggtttaacataacaaattggctgtggtatataaaattattcataatgatagtaggaggcttggtaggtttaagaatagtttttgctgtactttctatagtgaatagagttaggcagggatattcaccattatcgtttcagacccacctcccaaccccgaggggacccgacaggcccgaaggaatagaagaagaaggtggagagagagacagagacagatccattcgattagtgaacggatctcgacggttaacttttaaaagaaaaggggggattggggggtacagtgcaggggaaagaatagtagacataatagcaacagacatacaaactaaagaattacaaaaacaaattacaaaaattcaaaattttatcgatactagtggcgcgccggattcgacattgattattgactagttattaatagtaatcaattacggggtcattagttcatagcccatatatggagttccgcgttacataacttacggtaaatggcccgcctggctgaccgcccaacgacccccgcccattgacgtcaataatgacgtatgttcccatagtaacgccaatagggactttccattgacgtcaatgggtggagtatttacggtaaactgcccacttggcagtacatcaagtgtatcatatgccaagtacgccccctattgacgtcaatgacggtaaatggcccgcctggcattatgcccagtacatgaccttatgggactttcctacttggcagtacatctacgtattagtcatcgctattaccatggtcgaggtgagccccacgttctgcttcactctccccatctcccccccctccccacccccaattttgtatttatttattttttaattattttgtgcagcgatgggggcggggggggggggggggcgcgcgccaggcggggcggggcggggcgaggggcggggcggggcgaggcggagaggtgcggcggcagccaatcagagcggcgcgctccgaaagtttccttttatggcgaggcggcggcggcggcggccctataaaaagcgaagcgcgcggcgggcgggagtcgctgcgttgccttcgccccgtgccccgctccgcgccgcctcgcgccgcccgccccggctctgactgaccgcgttactcccacaggtgagcgggcgggacggcccttctcctccgggctgtaattagcgcttggtttaatgacggctcgtttcttttctgtggctgcgtgaaagccttaaagggctccgggagggccctttgtgcgggggggagcggctcggggggtgcgtgcgtgtgtgtgtgcgtggggagcgccgcgtgcggcccgcgctgcccggcggctgtgagcgctgcgggcgcggcgcggggctttgtgcgctccgcgtgtgcgcgaggggagcgcggccgggggcggtgccccgcggtgcgggggggctgcgaggggaacaaaggctgcgtgcggggtgtgtgcgtgggggggtgagcagggggtgtgggcgcggcggtcgggctgtaacccccccctgcacccccctccccgagttgctgagcacggcccggcttcgggtgcggggctccgtgcggggcgtggcgcggggctcgccgtgccgggcggggggtggcggcaggtgggggtgccgggcggggcggggccgcctcgggccggggagggctcgggggaggggcgcggcggccccggagcgccggcggctgtcgaggcgcggcgagccgcagccattgccttttatggtaatcgtgcgagagggcgcagggacttcctttgtcccaaatctggcggagccgaaatctgggaggcgccgccgcaccccctctagcgggcgcgggcgaagcggtgcggcgccggcaggaaggaaatgggcggggagggccttcgtgcgtcgccgcgccgccgtccccttctccatctccagcctcggggctgccgcagggggacggctgccttcgggggggacggggcagggcggggttcggcttctggcgtgtgaccggcggctctagagcctctgctaaccatgttcatgccttcttctttttcctacagatccttaattaagccaccatgccaaaaaagaagagaaaggtaatggacaagaagtacagcatcggcctggccatcggcaccaactctgtgggctgggccgtgatcaccgacgagtacaaggtgcccagcaagaaattcaaggtgctgggcaacaccgaccggcacagcatcaagaagaacctgatcggcgccctgctgttcgacagcggagaaacagccgaggccacccggctgaagagaaccgccagaagaagatacaccagacggaagaaccggatctgctatctgcaagagatcttcagcaacgagatggccaaggtggacgacagcttcttccacagactggaagagtccttcctggtggaagaggataagaagcacgagcggcaccccatcttcggcaacatcgtggacgaggtggcctaccacgagaagtaccccaccatctaccacctgagaaagaaactggtggacagcaccgacaaggccgacctgcggctgatctatctggccctggcccacatgatcaagttccggggccacttcctgatcgagggcgacctgaaccccgacaacagcgacgtggacaagctgttcatccagctggtgcagacctacaaccagctgttcgaggaaaaccccatcaacgccagcggcgtggacgccaaggccatcctgtctgccagactgagcaagagcagacggctggaaaatctgatcgcccagctgcccggcgagaagaagaatggcctgttcggcaacctgattgccctgagcctgggcctgacccccaacttcaagagcaacttcgacctggccgaggatgccaaactgcagctgagcaaggacacctacgacgacgacctggacaacctgctggcccagatcggcgaccagtacgccgacctgtttctggccgccaagaacctgtccgacgccatcctgctgagcgacatcctgagagtgaacaccgagatcaccaaggcccccctgagcgcctctatgatcaagagatacgacgagcaccaccaggacctgaccctgctgaaagctctcgtgcggcagcagctgcctgagaagtacaaagagattttcttcgaccagagcaagaacggctacgccggctacatcgatggcggagccagccaggaagagttctacaagttcatcaagcccatcctggaaaagatggacggcaccgaggaactgctcgtgaagctgaacagagaggacctgctgcggaagcagcggaccttcgacaacggcagcatcccccaccagatccacctgggagagctgcacgccattctgcggcggcaggaagatttttacccattcctgaaggacaaccgggaaaagatcgagaagatcctgaccttccgcatcccctactacgtgggccctctggccaggggaaacagcagattcgcctggatgaccagaaagagcgaggaaaccatcaccccctggaacttcgaggaagtggtggacaagggcgccagcgcccagagcttcatcgagcggatgaccaacttcgataagaacctgcccaacgagaaggtgctgcccaagcacagcctgctgtacgagtacttcaccgtgtacaacgagctgaccaaagtgaaatacgtgaccgagggaatgagaaagcccgccttcctgagcggcgagcagaaaaaagccatcgtggacctgctgttcaagaccaaccggaaagtgaccgtgaagcagctgaaagaggactacttcaagaaaatcgagtgcttcgactccgtggaaatctccggcgtggaagatcggttcaacgcctccctgggcacataccacgatctgctgaaaattatcaaggacaaggacttcctggacaatgaggaaaacgaggacattctggaagatatcgtgctgaccctgacactgtttgaggacagagagatgatcgaggaacggctgaaaacctatgcccacctgttcgacgacaaagtgatgaagcagctgaagcggcggagatacaccggctggggcaggctgagccggaagctgatcaacggcatccgggacaagcagtccggcaagacaatcctggatttcctgaagtccgacggcttcgccaacagaaacttcatgcagctgatccacgacgacagcctgacctttaaagaggacatccagaaagcccaggtgtccggccagggcgatagcctgcacgagcacattgccaatctggccggcagccccgccattaagaagggcatcctgcagacagtgaaggtggtggacgagctcgtgaaagtgatgggccggcacaagcccgagaacatcgtgatcgaaatggccagagagaaccagaccacccagaagggacagaagaacagccgcgagagaatgaagcggatcgaagagggcatcaaagagctgggcagccagatcctgaaagaacaccccgtggaaaacacccagctgcagaacgagaagctgtacctgtactacctgcagaatgggcgggatatgtacgtggaccaggaactggacatcaaccggctgtccgactacgatgtggacgctatcgtgcctcagagctttctgaaggacgactccatcgataacaaagtgctgactcggagcgacaagaaccggggcaagagcgacaacgtgccctccgaagaggtcgtgaagaagatgaagaactactggcgccagctgctgaatgccaagctgattacccagaggaagttcgacaatctgaccaaggccgagagaggcggcctgagcgaactggataaggccggcttcatcaagagacagctggtggaaacccggcagatcacaaagcacgtggcacagatcctggactcccggatgaacactaagtacgacgagaacgacaaactgatccgggaagtgaaagtgatcaccctgaagtccaagctggtgtccgatttccggaaggatttccagttttacaaagtgcgcgagatcaacaactaccaccacgcccacgacgcctacctgaacgccgtcgtgggaaccgccctgatcaaaaagtaccctaagctggaaagcgagttcgtgtacggcgactacaaggtgtacgacgtgcggaagatgatcgccaagagcgagcaggaaatcggcaaggctaccgccaagtacttcttctacagcaacatcatgaactttttcaagaccgagattaccctggccaacggcgagatccggaagcggcctctgatcgagacaaacggcgaaacaggcgagatcgtgtgggataagggccgggactttgccaccgtgcggaaagtgctgtctatgccccaagtgaatatcgtgaaaaagaccgaggtgcagacaggcggcttcagcaaagagtctatcctgcccaagaggaacagcgacaagctgatcgccagaaagaaggactgggaccctaagaagtacggcggcttcgacagccccaccgtggcctattctgtgctggtggtggccaaagtggaaaagggcaagtccaagaaactgaagagtgtgaaagagctgctggggatcaccatcatggaaagaagcagcttcgagaagaatcccatcgactttctggaagccaagggctacaaagaagtgaaaaaggacctgatcatcaagctgcctaagtactccctgttcgagctggaaaacggccggaagagaatgctggcctctgccggcgaactgcagaagggaaacgaactggccctgccctccaaatatgtgaacttcctgtacctggccagccactatgagaagctgaagggctcccccgaggataatgagcagaaacagctgtttgtggaacagcacaaacactacctggacgagatcatcgagcagatcagcgagttctccaagagagtgatcctggccgacgctaatctggacaaggtgctgagcgcctacaacaagcacagagacaagcctatcagagagcaggccgagaatatcatccacctgtttaccctgaccaatctgggagcccctgccgccttcaagtactttgacaccaccatcgaccggaagaggtacaccagcaccaaagaggtgctggacgccaccctgatccaccagagcatcaccggcctgtacgagacacggatcgacctgtctcagctgggaggcgacgcctatccctatgacgtgcccgattatgccagcctgggcagcggctcccccaagaaaaaacgcaaggtggaagatcctaagaaaaagcggaaagtggacggcggagggccgagctctggcgcacccccaccaagtggagggtctcctgccgggtccccaacatctactgaagaaggcaccagcgaatccgcaacgcccgagtcaggccctggtacctccacagaaccatctgaaggtagtgcgcctggttccccagctggaagccctacttccaccgaagaaggcacgtcaaccgaaccaagtgaaggatctgcccctgggaccagcactgaaccatctgagatgaacaattcccagggaagagtgaccttcgaggacgtgaccgtgaacttcacccaaggcgagtggcagagactgaaccccgagcagagaaacctgtaccgggacgtgatgctggaaaactacagcaacctggtgtccgtcggccagggcgagacaacaaagcctgacgtgatcctgcggctggaacagggcaaagagccttggctggaagaggaagaggtgctcggatctggcagagccgagaagaatggcgatatcggcggacagatctggaagccaaaggatgtgaaagagagtctcagcggcagcgagacccccggtaccagcgagagcgccacccccgagagcatgggccctatggagatatacaagacagtgtctgcatggaagagacagccagtgcgggtactgagcctcttcagaaacatcgacaaggtactaaagagtttgggcttcttggaaagcggttctggttctgggggaggaacgctgaagtacgtggaagatgtcacaaatgtcgtgaggagagacgtggagaaatggggcccctttgacctggtgtacggctcgacgcagcccctaggcagctcttgtgatcgctgtcccggctggtacatgttccagttccaccggatcctgcagtatgcgctgcctcgccaggagagtcagcggcccttcttctggatattcatggacaatctgctgctgactgaggatgaccaagagacaactacccgcttccttcagacagaggctgtgaccctccaggatgtccgtggcagagactaccagaatgctatgcgggtgtggagcaacattccagggctgaagagcaagcatgcgcccctgaccccaaaggaagaagagtatctgcaagcccaagtcagaagcaggagcaagctggacgccccgaaagttgacctcctggtgaagaactgccttctcccgctgagagagtacttcaagtatttttctcaaaactcacttcctctttctagcggcaatagtaacgctaacagccgcgggccgagcttcagcagcggcctggtgccgttaagcttgcgcggcagccatatgaaccatgaccaggaatttgaccccccaaaggtttacccacctgtgccagctgagaagaggaagcccatccgcgtgctgtctctctttgatgggattgctacagggctcctggtgctgaaggacctgggcatccaagtggaccgctacattgcctccgaggtgtgtgaggactccatcacggtgggcatggtgcggcaccagggaaagatcatgtacgtcggggacgtccgcagcgtcacacagaagcatatccaggagtggggcccattcgacctggtgattggaggcagtccctgcaatgacctctccattgtcaaccctgcccgcaagggactttatgagggtactggccgcctcttctttgagttctaccgcctcctgcatgatgcgcggcccaaggagggagatgatcgccccttcttctggctctttgagaatgtggtggccatgggcgttagtgacaagagggacatctcgcgatttcttgagtctaaccccgtgatgattgacgccaaagaagtgtctgctgcacacagggcccgttacttctggggtaaccttcctggcatgaacaggcctttggcatccactgtgaatgataagctggagctgcaagagtgtctggagcacggcagaatagccaagttcagcaaagtgaggaccattaccaccaggtcaaactctataaagcagggcaaagaccagcatttccccgtcttcatgaacgagaaggaggacatcctgtggtgcactgaaatggaaagggtgtttggcttccccgtccactacacagacgtctccaacatgagccgcttggcgaggcagagactgctgggccgatcgtggagcgtgccggtcatccgccacctcttcgctccgctgaaggaatattttgcttgtgtgctcgaggctactaacttcagcctgctgaagcaggctggagacgtggaggagaaccctggacctatgcatgtgagcgagctgattaaggagaacatgcacatgaagctgtacatggagggcaccgtggacaaccatcacttcaagtgcacatccgagggcgaaggcaagccctacgagggcacccagaccatgagaatcaaggtggtcgagggcggccctctccccttcgccttcgacatcctggctactagcttcctctacggcagcaagaccttcatcaaccacacccagggcatccccgacttcttcaagcagtccttccctgagggcttcacatgggagagagtcaccacatacgaagacgggggcgtgctgaccgctacccaggacaccagcctccaggacggctgcctcatctacaacgtcaagatcagaggggtgaacttcacatccaacggccctgtgatgcagaagaaaacactcggctgggaggccttcaccgaaacgctgtaccccgctgacggcggcctggaaggcagaaacgacatggccctgaagctcgtgggcgggagccatctgatcgcaaacatcaagaccacatatagatccaagaaacccgctaagaacctcaagatgcctggcgtctactatgtggactacagactggaaagaatcaaggaggccaacaacgagacctacgtcgagcagcacgaggtggcagtggccagatactgcgacctccctagcaaactggggcacaagcttaattaagtcgacaatcaacctctggattacaaaatttgtgaaagattgactggtattcttaactatgttgctccttttacgctatgtggatacgctgctttaatgcctttgtatcatgctattgcttcccgtatggctttcattttctcctccttgtataaatcctggttgctgtctctttatgaggagttgtggcccgttgtcaggcaacgtggcgtggtgtgcactgtgtttgctgacgcaacccccactggttggggcattgccaccacctgtcagctcctttccgggactttcgctttccccctccctattgccacggcggaactcatcgccgcctgccttgcccgctgctggacaggggctcggctgttgggcactgacaattccgtggtgttgtcggggaaatcatcgtcctttccttggctgctcgcctgtgttgccacctggattctgcgcgggacgtccttctgctacgtcccttcggccctcaatccagcggaccttccttcccgcggcctgctgccggctctgcggcctcttccgcgtcttcgccttcgccctcagacgagtcggatctccctttgggccgcctccccgcctggtacctttaagaccaatgacttacaaggcagctgtagatcttagccactttttaaaagaaaaggggggactggaagggctaattcactcccaacgaaaataagatctgctttttgcttgtactgggtctctctggttagaccagatctgagcctgggagctctctggctaactagggaacccactgcttaagcctcaataaagcttgccttgagtgcttcaagtagtgtgtgcccgtctgttgtgtgactctggtaactagagatccctcagacccttttagtcagtgtggaaaatctctagcagtagtagttcatgtcatcttattattcagtatttataacttgcaaagaaatgaatatcagagagtgagaggaacttgtttattgcagcttataatggttacaaataaagcaatagcatcacaaatttcacaaataaagcatttttttcactgcattctagttgtggtttgtccaaactcatcaatgtatcttatcatgtctggctctagctatcccgcccctaactccgcccagttccgcccattctccgccccatggctgactaattttttttatttatgcagaggccgaggccgcctcggcctctgagctattccagaagtagtgaggaggcttttttggaggcctagacttttgcagagacggcccaaattcgtaatcatggtcatagctgtttcctgtgtgaaattgttatccgctcacaattccacacaacatacgagccggaagcataaagtgtaaagcctggggtgcctaatgagtgagctaactcacattaattgcgttgcgctcactgcccgctttccagtcgggaaacctgtcgtgccagctgcattaatgaatcggccaacgcgcggggagaggcggtttgcgtattgggcgctcttccgcttcctcgctcactgactcgctgcgctcggtcgttcggctgcggcgagcggtatcagctcactcaaaggcggtaatacggttatccacagaatcaggggataacgcaggaaagaacatgtgagcaaaaggccagcaaaaggccaggaaccgtaaaaaggccgcgttgctggcgtttttccataggctccgcccccctgacgagcatcacaaaaatcgacgctcaagtcagaggtggcgaaacccgacaggactataaagataccaggcgtttccccctggaagctccctcgtgcgctctcctgttccgaccctgccgcttaccggatacctgtccgcctttctcccttcgggaagcgtggcgctttctcatagctcacgctgtaggtatctcagttcggtgtaggtcgttcgctccaagctgggctgtgtgcacgaaccccccgttcagcccgaccgctgcgccttatccggtaactatcgtcttgagtccaacccggtaagacacgacttatcgccactggcagcagccactggtaacaggattagcagagcgaggtatgtaggcggtgctacagagttcttgaagtggtggcctaactacggctacactagaaggacagtatttggtatctgcgctctgctgaagccagttaccttcggaaaaagagttggtagctcttgatccggcaaacaaaccaccgctggtagcggtggtttttttgtttgcaagcagcagattacgcgcagaaaaaaaggatctcaagaagatcctttgatcttttctacggggtctgacgctcagtggaacgaaaactcacgttaagggattttggtcatgagattatcaaaaaggatcttcacctagatccttttaaattaaaaatgaagttttaaatcaatctaaagtatatatgagtaaacttggtctgacagttaccaatgcttaatcagtgaggcacctatctcagcgatctgtctatttcgttcatccatagttgcctgactccccgtcgtgtagataactacgatacgggagggcttaccatctggccccagtgctgcaatgataccgcgagacccacgctcaccggctccagatttatcagcaataaaccagccagccggaagggccgagcgcagaagtggtcctgcaactttatccgcctccatccagtctattaattgttgccgggaagctagagtaagtagttcgccagttaatagtttgcgcaacgttgttgccattgctacaggcatcgtggtgtcacgctcgtcgtttggtatggcttcattcagctccggttcccaacgatcaaggcgagttacatgatcccccatgttgtgcaaaaaagcggttagctccttcggtcctccgatcgttgtcagaagtaagttggccgcagtgttatcactcatggttatggcagcactgcataattctcttactgtcatgccatccgtaagatgcttttctgtgactggtgagtactcaaccaagtcattctgagaatagtgtatgcggcgaccgagttgctcttgcccggcgtcaatacgggataataccgcgccacatagcagaactttaaaagtgctcatcattggaaaacgttcttcggggcgaaaactctcaaggatcttaccgctgttgagatccagttcgatgtaacccactcgtgcacccaactgatcttcagcatcttttactttcaccagcgtttctgggtgagcaaaaacaggaaggcaaaatgccgcaaaaaagggaataagggcgacacggaaatgttgaatactcatactcttcctttttcaatattattgaagcatttatcagggttattgtctcatgagcggatacatatttgaatgtatttagaaaaataaacaaataggggttccgcgcacatttccccgaaaagtgccacctgacgtctaagaaaccattattatcatgacattaacctataaaaataggcgtatcacgaggccctttcgtctcgcgcgtttcggtgatgacggtgaaaacctctgacacatgcagctcccggagacggtcacagcttgtctgtaagcggatgccgggagcagacaagcccgtcagggcgcgtcagcgggtgttggcgggtgtcggggctggcttaactatgcggcatcagagcagattgtactgagagtgcaccatatgcggtgtgaaataccgcacagatgcgtaaggagaaaataccgcatcaggcgccattcgccattcaggctgcgcaactgttgggaagggcgatcggtgcgggcctcttcgctattacgccagctggcgaaagggggatgtgctgcaaggcgattaagttgggtaacgccagggttttcccagtcacgacgttgtaaaacgacggccagtgccaagctg

SEQ ID NO: 132 - DNA, 14892 bp, synthetic construct
  misc_feature 1..14892: note = V14 DNA
  source 1..14892: mol_type = other DNA
acgcgtgtagtcttatgcaatactcttgtagtcttgcaacatggtaacgatgagttagcaacatgccttacaaggagagaaaaagcaccgtgcatgccgattggtggaagtaaggtggtacgatcgtgccttattaggaaggcaacagacgggtctgacatggattggacgaaccactgaattgccgcattgcagagatattgtatttaagtgcctagctcgatacaataaacgggtctctctggttagaccagatctgagcctgggagctctctggctaactagggaacccactgcttaagcctcaataaagcttgccttgagtgcttcaagtagtgtgtgcccgtctgttgtgtgactctggtaactagagatccctcagacccttttagtcagtgtggaaaatctctagcagtggcgcccgaacagggacctgaaagcgaaagggaaaccagagctctctcgacgcaggactcggcttgctgaagcgcgcacggcaagaggcgaggggcggcgactggtgagtacgccaaaaattttgactagcggaggctagaaggagagagatgggtgcgagagcgtcagtattaagcgggggagaattagatcgcgatgggaaaaaattcggttaaggccagggggaaagaaaaaatataaattaaaacatatagtatgggcaagcagggagctagaacgattcgcagttaatcctggcctgttagaaacatcagaaggctgtagacaaatactgggacagctacaaccatcccttcagacaggatcagaagaacttagatcattatataatacagtagcaaccctctattgtgtgcatcaaaggatagagataaaagacaccaaggaagctttagacaagatagaggaagagcaaaacaaaagtaagaccaccgcacagcaagcggccactgatcttcagacctggaggaggagatatgagggacaattggagaagtgaattatataaatataaagtagtaaaaattgaaccattaggagtagcacccaccaaggcaaagagaagagtggtgcagagagaaaaaagagcagtgggaataggagctttgttccttgggttcttgggagcagcaggaagcactatgggcgcagcctcaatgacgctgacggtacaggccagacaattattgtctggtatagtgcagcagcagaacaatttgctgagggctattgaggcgcaacagcatctgttgcaactcacagtctggggcatcaagcagctccaggcaagaatcctggctgtggaaagatacctaaaggatcaacagctcctggggatttggggttgctctggaaaactcatttgcaccactgctgtgccttggaatgctagttggagtaataaatctctggaacagattggaatcacacgacctggatggagtgggacagagaaattaacaattacacaagcttaatacactccttaattgaagaatcgcaaaaccagcaagaaaagaatgaacaagaattattggaattagataaatgggcaagtttgtggaattggtttaacataacaaattggctgtggtatataaaattattcataatgatagtaggaggcttggtaggtttaagaatagtttttgctgtactttctatagtgaatagagttaggcagggatattcaccattatcgtttcagacccacctcccaaccccgaggggacccgacaggcccgaaggaatagaagaagaaggtggagagagagacagagacagatccattcgattagtgaacggatctcgacggttaacttttaaaagaaaaggggggattggggggtacagtgcaggggaaagaatagtagacataatagcaacagacatacaaactaaagaattacaaaaacaaattacaaaaattcaaaattttatcgatactagtggcgcgccggattcgacattgattattgactagttattaatagtaatcaattacggggtcattagttcatagcccatatatggagttccgcgttacataacttacggtaaatggcccgcctggctgaccgcccaacgacccccgcccattgacgtcaataatgacgtatgttcccatagtaacgccaatagggactttccattgacgtcaatgggtggagtatttacggtaaactgcccacttggcagtacatcaagtgtatcatatgccaagtacgccccctattgacgtcaatgacggtaaatggcccgcctggcattatgcccagtacatgaccttatgggactttcctacttggcagtacatctacgtattagtcatcgctattaccatggtcgaggtgagccccacgttctgcttcactctccccatctcccccccctccccacccccaattttgtatttatttattttttaattattttgtgcagcgatgggggcggggggggggggggggcgcgcgccaggcggggcggggcggggcgaggggcggggcggggcgaggcggagaggtgcggcggcagccaatcagagcggcgcgctccgaaagtttccttttatggcgaggcggcggcggcggcggccctataaaaagcgaagcgcgcggcgggcgggagtcgctgcgttgccttcgccccgtgccccgctccgcgccgcctcgcgccgcccgccccggctctgactgaccgcgttactcccacaggtgagcgggcgggacggcccttctcctccgggctgtaattagcgcttggtttaatgacggctcgtttcttttctgtggctgcgtgaaagccttaaagggctccgggagggccctttgtgcgggggggagcggctcggggggtgcgtgcgtgtgtgtgtgcgtggggagcgccgcgtgcggcccgcgctgcccggcggctgtgagcgctgcgggcgcggcgcggggctttgtgcgctccgcgtgtgcgcgaggggagcgcggccgggggcggtgccccgcggtgcgggggggctgcgaggggaacaaaggctgcgtgcggggtgtgtgcgtgggggggtgagcagggggtgtgggcgcggcggtcgggctgtaacccccccctgcacccccctccccgagttgctgagcacggcccggcttcgggtgcggggctccgtgcggggcgtggcgcggggctcgccgtgccgggcggggggtggcggcaggtgggggtgccgggcggggcggggccgcctcgggccggggagggctcgggggaggggcgcggcggccccggagcgccggcggctgtcgaggcgcggcgagccgcagccattgccttttatggtaatcgtgcgagagggcgcagggacttcctttgtcccaaatctggcggagccgaaatctgggaggcgccgccgcaccccctctagcgggcgcgggcgaagcggtgcggcgccggcaggaaggaaatgggcggggagggccttcgtgcgtcgccgcgccgccgtccccttctccatctccagcctcggggctgccgcagggggacggctgccttcgggggggacggggcagggcggggttcggcttctggcgtgtgaccggcggctctagagcctctgctaaccatgttcatgccttcttctttttcctacagatccttaattaagccaccatgccaaaaaagaagagaaaggtaatggacaagaagtacagcatcggcctggccatcggcaccaactctgtgggctgggccgtgatcaccgacgagtacaaggtgcccagcaagaaattcaaggtgctgggcaacaccgaccggcacagcatcaagaagaacctgatcggcgccctgctgttcgacagcggagaaacagccgaggccacccggctgaagagaaccgccagaagaagatacaccagacggaagaaccggatctgctatctgcaagagatcttcagcaacgagatggccaaggtggacgacagcttcttccacagactggaagagtccttcctggtggaagaggataagaagcacgagcggcaccccatcttcggcaacatcgtggacgaggtggcctaccacgagaagtaccccaccatctaccacctgagaaagaaactggtggacagcaccgacaaggccgacctgcggctgatctatctggccctggcccacatgatcaagttccggggccacttcctgatcgagggcgacctgaaccccgacaacagcgacgtggacaagctgttcatccagctggtgcagacctacaaccagctgttcgaggaaaaccccatcaacgccagcggcgtggacgccaaggccatcctgtctgccagactgagcaagagcagacggctggaaaatctgatcgcccagctgcccggcgagaagaagaatggcctgttcggcaacctgattgccctgagcctgggcctgacccccaacttcaagagcaacttcgacctggccgaggatgccaaactgcagctgagcaaggacacctacgacgacgacctggacaacctgctggcccagatcggcgaccagtacgccgacctgtttctggccgccaagaacctgtccgacgccatcctgctgagcgacatcctgagagtgaacaccgagatcaccaaggcccccctgagcgcctctatgatcaagagatacgacgagcaccaccaggacctgaccctgctgaaagctctcgtgcggcagcagctgcctgagaagtacaaagagattttcttcgaccagagcaagaacggctacgccggctacatcgatggcggagccagccaggaagagttctacaagttcatcaagcccatcctggaaaagatggacggcaccgaggaactgctcgtgaagctgaacagagaggacctgctgcggaagcagcggaccttcgacaacggcagcatcccccaccagatccacctgggagagctgcacgccattctgcggcggcaggaagatttttacccattcctgaaggacaaccgggaaaagatcgagaagatcctgaccttccgcatcccctactacgtgggccctctggccaggggaaacagcagattcgcctggatgaccagaaagagcgaggaaaccatcaccccctggaacttcgaggaagtggtggacaagggcgccagcgcccagagcttcatcgagcggatgaccaacttcgataagaacctgcccaacgagaaggtgctgcccaagcacagcctgctgtacgagtacttcaccgtgtacaacgagctgaccaaagtgaaatacgtgaccgagggaatgagaaagcccgccttcctgagcggcgagcagaaaaaagccatcgtggacctgctgttcaagaccaaccggaaagtgaccgtgaagcagctgaaagaggactacttcaagaaaatcgagtgcttcgactccgtggaaatctccggcgtggaagatcggttcaacgcctccctgggcacataccacgatctgctgaaaattatcaaggacaaggacttcctggacaatgaggaaaacgaggacattctggaagatatcgtgctgaccctgacactgtttgaggacagagagatgatcgaggaacggctgaaaacctatgcccacctgttcgacgacaaagtgatgaagcagctgaagcggcggagatacaccggctggggcaggctgagccggaagctgatcaacggcatccgggacaagcagtccggcaagacaatcctggatttcctgaagtccgacggcttcgccaacagaaacttcatgcagctgatccacgacgacagcctgacctttaaagaggacatccagaaagcccaggtgtccggccagggcgatagcctgcacgagcacattgccaatctggccggcagccccgccattaagaagggcatcctgcagacagtgaaggtggtggacgagctcgtgaaagtgatgggccggcacaagcccgagaacatcgtgatcgaaatggccagagagaaccagaccacccagaagggacagaagaacagccgcgagagaatgaagcggatcgaagagggcatcaaagagctgggcagccagatcctgaaagaacaccccgtggaaaacacccagctgcagaacgagaagctgtacctgtactacctgcagaatgggcgggatatgtacgtggaccaggaactggacatcaaccggctgtccgactacgatgtggacgctatcgtgcctcagagctttctgaaggacgactccatcgataacaaagtgctgactcggagcgacaagaaccggggcaagagcgacaacgtgccctccgaagaggtcgtgaagaagatgaagaactactggcgccagctgctgaatgccaagctgattacccagaggaagttcgacaatctgaccaaggccgagagaggcggcctgagcgaactggataaggccggcttcatcaagagacagctggtggaaacccggcagatcacaaagcacgtggcacagatcctggactcccggatgaacactaagtacgacgagaacgacaaactgatccgggaagtgaaagtgatcaccctgaagtccaagctggtgtccgatttccggaaggatttccagttttacaaagtgcgcgagatcaacaactaccaccacgcccacgacgcctacctgaacgccgtcgtgggaaccgccctgatcaaaaagtaccctaagctggaaagcgagttcgtgtacggcgactacaaggtgtacgacgtgcggaagatgatcgccaagagcgagcaggaaatcggcaaggctaccgccaagtacttcttctacagcaacatcatgaactttttcaagaccgagattaccctggccaacggcgagatccggaagcggcctctgatcgagacaaacggcgaaacaggcgagatcgtgtgggataagggccgggactttgccaccgtgcggaaagtgctgtctatgccccaagtgaatatcgtgaaaaagaccgaggtgcagacaggcggcttcagcaaagagtctatcctgcccaagaggaacagcgacaagctgatcgccagaaagaaggactgggaccctaagaagtacggcggcttcgacagccccaccgtggcctattctgtgctggtggtggccaaagtggaaaagggcaagtccaagaaactgaagagtgtgaaagagctgctggggatcaccatcatggaaagaagcagcttcgagaagaatcccatcgactttctggaagccaagggctacaaagaagtgaaaaaggacctgatcatcaagctgcctaagtactccctgttcgagctggaaaacggccggaagagaatgctggcctctgccggcgaactgcagaagggaaacgaactggccctgccctccaaatatgtgaacttcctgtacctggccagccactatgagaagctgaagggctcccccgaggataatgagcagaaacagctgtttgtggaacagcacaaacactacctggacgagatcatcgagcagatcagcgagttctccaagagagtgatcctggccgacgctaatctggacaaggtgctgagcgcctacaacaagcacagagacaagcctatcagagagcaggccgagaatatcatccacctgtttaccctgaccaatctgggagcccctgccgccttcaagtactttgacaccaccatcgaccggaagaggtacaccagcaccaaagaggtgctggacgccaccctgatccaccagagcatcaccggcctgtacgagacacggatcgacctgtctcagctgggaggcgacgcctatccctatgacgtgcccgattatgccagcctgggcagcggctcccccaagaaaaaacgcaaggtggaagatcctaagaaaaagcggaaagtggacggcggagggccgagctctggcgcacccccaccaagtggagggtctcctgccgggtccccaacatctactgaagaaggcaccagcgaatccgcaacgcccgagtcaggccctggtacctccacagaaccatctgaaggtagtgcgcctggttccccagctggaagccctacttccaccgaagaaggcacgtcaaccgaaccaagtgaaggatctgcccctgggaccagcactgaaccatctgagatgaacaattcccagggaagagtgaccttcgaggatgtcactgtgaacttcacccagggggagtggcagcggctgaatcccgaacagagaaacttgtacagggatgtgatgctggagaattacagcaaccttgtctctgtgggacaaggggaaaccaccaaacccgatgtgatcttgaggttggaacaaggaaaggagccatggttggaggaagaggaagtgctgggaagtggccgtgcagaaaaaaatggggacattggagggcagatttggaagccaaaggatgtgaaagagagtctcagcggcagcgagacccccggtaccagcgagggcggccctagcagcggcgcccctccccctagcggcggcagccctgccggatcccctacaagcaccgaggagggcacaagcaccgagccttccgagggcagcgcccccggaacaagcaccgaacctagcgagagcgccacccccgagagcatgggccctatggagatatacaagacagtgtctgcatggaagagacagccagtgcgggtactgagcctcttcagaaacatcgacaaggtactaaagagtttgggcttcttggaaagcggttctggttctgggggaggaacgctgaagtacgtggaagatgtcacaaatgtcgtgaggagagacgtggagaaatggggcccctttgacctggtgtacggctcgacgcagcccctaggcagctcttgtgatcgctgtcccggctggtacatgttccagttccaccggatcctgcagtatgcgctgcctcgccaggagagtcagcggcccttcttctggatattcatggacaatctgctgctgactgaggatgaccaagagacaactacccgcttccttcagacagaggctgtgaccctccaggatgtccgtggcagagactaccagaatgctatgcgggtgtggagcaacattccagggctgaagagcaagcatgcgcccctgaccccaaaggaagaagagtatctgcaagcccaagtcagaagcaggagcaagctggacgccccgaaagttgacctcctggtgaagaactgccttctcccgctgagagagtacttcaagtatttttctcaaaactcacttcctctttctagcggcaatagtaacgctaacagccgcgggccgagcttcagcagcggcctggtgccgttaagcttgcgcggcagccatatgaaccatgaccaggaatttgaccccccaaaggtttacccacctgtgccagctgagaagaggaagcccatccgcgtgctgtctctctttgatgggattgctacagggctcctggtgctgaaggacctgggcatccaagtggaccgctacattgcctccgaggtgtgtgaggactccatcacggtgggcatggtgcggcaccagggaaagatcatgtacgtcggggacgtccgcagcgtcacacagaagcatatccaggagtggggcccattcgacctggtgattggaggcagtccctgcaatgacctctccattgtcaaccctgcccgcaagggactttatgagggtactggccgcctcttctttgagttctaccgcctcctgcatgatgcgcggcccaaggagggagatgatcgccccttcttctggctctttgagaatgtggtggccatgggcgttagtgacaagagggacatctcgcgatttcttgagtctaaccccgtgatgattgacgccaaagaagtgtctgctgcacacagggcccgttacttctggggtaaccttcctggcatgaacaggcctttggcatccactgtgaatgataagctggagctgcaagagtgtctggagcacggcagaatagccaagttcagcaaagtgaggaccattaccaccaggtcaaactctataaagcagggcaaagaccagcatttccccgtcttcatgaacgagaaggaggacatcctgtggtgcactgaaatggaaagggtgtttggcttccccgtccactacacagacgtctccaacatgagccgcttggcgaggcagagactgctgggccgatcgtggagcgtgccggtcatccgccacctcttcgctccgctgaaggaatattttgcttgtgtgctcgaggctactaacttcagcctgctgaagcaggctggagacgtggaggagaaccctggacctatgcatgtgagcgagctgattaaggagaacatgcacatgaagctgtacatggagggcaccgtggacaaccatcacttcaagtgcacatccgagggcgaaggcaagccctacgagggcacccagaccatgagaatcaaggtggtcgagggcggccctctccccttcgccttcgacatcctggctactagcttcctctacggcagcaagaccttcatcaaccacacccagggcatccccgacttcttcaagcagtccttccctgagggcttcacatgggagagagtcaccacatacgaagacgggggcgtgctgaccgctacccaggacaccagcctccaggacggctgcctcatctacaacgtcaagatcagaggggtgaacttcacatccaacggccctgtgatgcagaagaaaacactcggctgggaggccttcaccgaaacgctgtaccccgctgacggcggcctggaaggcagaaacgacatggccctgaagctcgtgggcgggagccatctgatcgcaaacatcaagaccacatatagatccaagaaacccgctaagaacctcaagatgcctggcgtctactatgtggactacagactggaaagaatcaaggaggccaacaacgagacctacgtcgagcagcacgaggtggcagtggccagatactgcgacctccctagcaaactggggcacaagcttaattaagtcgacaatcaacctctggattacaaaatttgtgaaagattgactggtattcttaactatgttgctccttttacgctatgtggatacgctgctttaatgcctttgtatcatgctattgcttcccgtatggctttcattttctcctccttgtataaatcctggttgctgtctctttatgaggagttgtggcccgttgtcaggcaacgtggcgtggtgtgcactgtgtttgctgacgcaacccccactggttggggcattgccaccacctgtcagctcctttccgggactttcgctttccccctccctattgccacggcggaactcatcgccgcctgccttgcccgctgctggacaggggctcggctgttgggcactgacaattccgtggtgttgtcggggaaatcatcgtcctttccttggctgctcgcctgtgttgccacctggattctgcgcgggacgtccttctgctacgtcccttcggccctcaatccagcggaccttccttcccgcggcctgctgccggctctgcggcctcttccgcgtcttcgccttcgccctcagacgagtcggatctccctttgggccgcctccccgcctggtacctttaagaccaatgacttacaaggcagctgtagatcttagccactttttaaaagaaaaggggggactggaagggctaattcactcccaacgaaaataagatctgctttttgcttgtactgggtctctctggttagaccagatctgagcctgggagctctctggctaactagggaacccactgcttaagcctcaataaagcttgccttgagtgcttcaagtagtgtgtgcccgtctgttgtgtgactctggtaactagagatccctcagacccttttagtcagtgtggaaaatctctagcagtagtagttcatgtcatcttattattcagtatttataacttgcaaagaaatgaatatcagagagtgagaggaacttgtttattgcagcttataatggttacaaataaagcaatagcatcacaaatttcacaaataaagcatttttttcactgcattctagttgtggtttgtccaaactcatcaatgtatcttatcatgtctggctctagctatcccgcccctaactccgcccagttccgcccattctccgccccatggctgactaattttttttatttatgcagaggccgaggccgcctcggcctctgagctattccagaagtagtgaggaggcttttttggaggcctagacttttgcagagacggcccaaattcgtaatcatggtcatagctgtttcctgtgtgaaattgttatccgctcacaattccacacaacatacgagccggaagcataaagtgtaaagcctggggtgcctaatgagtgagctaactcacattaattgcgttgcgctcactgcccgctttccagtcgggaaacctgtcgtgccagctgcattaatgaatcggccaacgcgcggggagaggcggtttgcgtattgggcgctcttccgcttcctcgctcactgactcgctgcgctcggtcgttcggctgcggcgagcggtatcagctcactcaaaggcggtaatacggttatccacagaatcaggggataacgcaggaaagaacatgtgagcaaaaggccagcaaaaggccaggaaccgtaaaaaggccgcgttgctggcgtttttccataggctccgcccccctgacgagcatcacaaaaatcgacgctcaagtcagaggtggcgaaacccgacaggactataaagataccaggcgtttccccctggaagctccctcgtgcgctctcctgttccgaccctgccgcttaccggatacctgtccgcctttctcccttcgggaagcgtggcgctttctcatagctcacgctgtaggtatctcagttcggtgtaggtcgttcgctccaagctgggctgtgtgcacgaaccccccgttcagcccgaccgctgcgccttatccggtaactatcgtcttgagtccaacccggtaagacacgacttatcgccactggcagcagccactggtaacaggattagcagagcgaggtatgtaggcggtgctacagagttcttgaagtggtggcctaactacggctacactagaaggacagtatttggtatctgcgctctgctgaagccagttaccttcggaaaaagagttggtagctcttgatccggcaaacaaaccaccgctggtagcggtggtttttttgtttgcaagcagcagattacgcgcagaaaaaaaggatctcaagaagatcctttgatcttttctacggggtctgacgctcagtggaacgaaaactcacgttaagggattttggtcatgagattatcaaaaaggatcttcacctagatccttttaaattaaaaatgaagttttaaatcaatctaaagtatatatgagtaaacttggtctgacagttaccaatgcttaatcagtgaggcacctatctcagcgatctgtctatttcgttcatccatagttgcctgactccccgtcgtgtagataactacgatacgggagggcttaccatctggccccagtgctgcaatgataccgcgagacccacgctcaccggctccagatttatcagcaataaaccagccagccggaagggccgagcgcagaagtggtcctgcaactttatccgcctccatccagtctattaattgttgccgggaagctagagtaagtagttcgccagttaatagtttgcgcaacgttgttgccattgctacaggcatcgtggtgtcacgctcgtcgtttggtatggcttcattcagctccggttcccaacgatcaaggcgagttacatgatcccccatgttgtgcaaaaaagcggttagctccttcggtcctccgatcgttgtcagaagtaagttggccgcagtgttatcactcatggttatggcagcactgcataattctcttactgtcatgccatccgtaagatgcttttctgtgactggtgagtactcaaccaagtcattctgagaatagtgtatgcggcgaccgagttgctcttgcccggcgtcaatacgggataataccgcgccacatagcagaactttaaaagtgctcatcattggaaaacgttcttcggggcgaaaactctcaaggatcttaccgctgttgagatccagttcgatgtaacccactcgtgcacccaactgatcttcagcatcttttactttcaccagcgtttctgggtgagcaaaaacaggaaggcaaaatgccgcaaaaaagggaataagggcgacacggaaatgttgaatactcatactcttcctttttcaatattattgaagcatttatcagggttattgtctcatgagcggatacatatttgaatgtatttagaaaaataaacaaataggggttccgcgcacatttccccgaaaagtgccacctgacgtctaagaaaccattattatcatgacattaacctataaaaataggcgtatcacgaggccctttcgtctcgcgcgtttcggtgatgacggtgaaaacctctgacacatgcagctcccggagacggtcacagcttgtctgtaagcggatgccgggagcagacaagcccgtcagggcgcgtcagcgggtgttggcgggtgtcggggctggcttaactatgcggcatcagagcagattgtactgagagtgcaccatatgcggtgtgaaataccgcacagatgcgtaaggagaaaataccgcatcaggcgccattcgccattcaggctgcgcaactgttgggaagggcgatcggtgcgggcctcttcgctattacgccagctggcgaaagggggatgtgctgcaaggcgattaagttgggtaacgccagggttttcccagtcacgacgttgtaaaacgacggccagtgccaagctg

SEQ ID NO: 133 - DNA, 9100 bp, synthetic construct
  misc_feature 1..9100: note = V15 DNA
  source 1..9100: mol_type = other DNA
tcgcgcgtttcggtgatgacggtgaaaacctctgacacatgcagctcccggacgtcattgtcgattagctttctagataatacgactcactataaggactcactatttgttttcgcgcccagttgcaaaaagtgtcgacatttgcttctgacacaactgtgttcactagcaacctcaaacagacaccgccaccatggtccctgctgctaagagagtgaaactggatggatccgacaagaagtacagcatcggcctggccatcggcaccaactctgtgggctgggccgtgatcaccgacgagtacaaggtgcccagcaagaaattcaaggtgctgggcaacaccgaccggcacagcatcaagaagaacctgatcggcgccctgctgttcgacagcggagaaacagccgaggccacccggctgaagagaaccgccagaagaagatacaccagacggaagaaccggatctgctatctgcaagagatcttcagcaacgagatggccaaggtggacgacagcttcttccacagactggaagagtccttcctggtggaagaggataagaagcacgagcggcaccccatcttcggcaacatcgtggacgaggtggcctaccacgagaagtaccccaccatctaccacctgagaaagaaactggtggacagcaccgacaaggccgacctgcggctgatctatctggccctggcccacatgatcaagttccggggccacttcctgatcgagggcgacctgaaccccgacaacagcgacgtggacaagctgttcatccagctggtgcagacctacaaccagctgttcgaggaaaaccccatcaacgccagcggcgtggacgccaaggccatcctgtctgccagactgagcaagagcagacggctggaaaatctgatcgcccagctgcccggcgagaagaagaatggcctgttcggcaacctgattgccctgagcctgggcctgacccccaacttcaagagcaacttcgacctggccgaggatgccaaactgcagctgagcaaggacacctacgacgacgacctggacaacctgctggcccagatcggcgaccagtacgccgacctgtttctggccgccaagaacctgtccgacgccatcctgctgagcgacatcctgagagtgaacaccgagatcaccaaggcccccctgagcgcctctatgatcaagagatacgacgagcaccaccaggacctgaccctgctgaaagctctcgtgcggcagcagctgcctgagaagtacaaagagattttcttcgaccagagcaagaacggctacgccggctacatcgatggcggagccagccaggaagagttctacaagttcatcaagcccatcctggaaaagatggacggcaccgaggaactgctcgtgaagctgaacagagaggacctgctgcggaagcagcggaccttcgacaacggcagcatcccccaccagatccacctgggagagctgcacgccattctgcggcggcaggaagatttttacccattcctgaaggacaaccgggaaaagatcgagaagatcctgaccttccgcatcccctactacgtgggccctctggccaggggaaacagcagattcgcctggatgaccagaaagagcgaggaaaccatcaccccctggaacttcgaggaagtggtggacaagggcgccagcgcccagagcttcatcgagcggatgaccaacttcgataagaacctgcccaacgagaaggtgctgcccaagcacagcctgctgtacgagtacttcaccgtgtacaacgagctgaccaaagtgaaatacgtgaccgagggaatgagaaagcccgccttcctgagcggcgagcagaaaaaagccatcgtggacctgctgttcaagaccaaccggaaagtgaccgtgaagcagctgaaagaggactacttcaagaaaatcgagtgcttcgactccgtggaaatctccggcgtggaagatcggttcaacgcctccctgggcacataccacgatctgctgaaaattatcaaggacaaggacttcctggacaatgaggaaaacgaggacattctggaagatatcgtgctgaccctgacactgtttgaggacagagagatgatcgaggaacggctgaaaacctatgcccacctgttcgacgacaaagtgatgaagcagctgaagcggcggagatacaccggctggggcaggctgagccggaagctgatcaacggcatccgggacaagcagtccggcaagacaatcctggatttcctgaagtccgacggcttcgccaacagaaacttcatgcagctgatccacgacgacagcctgacctttaaagaggacatccagaaagcccaggtgtccggccagggcgatagcctgcacgagcacattgccaatctggccggcagccccgccattaagaagggcatcctgcagacagtgaaggtggtggacgagctcgtgaaagtgatgggccggcacaagcccgagaacatcgtgatcgaaatggccagagagaaccagaccacccagaagggacagaagaacagccgcgagagaatgaagcggatcgaagagggcatcaaagagctgggcagccagatcctgaaagaacaccccgtggaaaacacccagctgcagaacgagaagctgtacctgtactacctgcagaatgggcgggatatgtacgtggaccaggaactggacatcaaccggctgtccgactacgatgtggacgctatcgtgcctcagagctttctgaaggacgactccatcgataacaaagtgctgactcggagcgacaagaaccggggcaagagcgacaacgtgccctccgaagaggtcgtgaagaagatgaagaactactggcgccagctgctgaatgccaagctgattacccagaggaagttcgacaatctgaccaaggccgagagaggcggcctgagcgaactggataaggccggcttcatcaagagacagctggtggaaacccggcagatcacaaagcacgtggcacagatcctggactcccggatgaacactaagtacgacgagaacgacaaactgatccgggaagtgaaagtgatcaccctgaagtccaagctggtgtccgatttccggaaggatttccagttttacaaagtgcgcgagatcaacaactaccaccacgcccacgacgcctacctgaacgccgtcgtgggaaccgccctgatcaaaaagtaccctaagctggaaagcgagttcgtgtacggcgactacaaggtgtacgacgtgcggaagatgatcgccaagagcgagcaggaaatcggcaaggctaccgccaagtacttcttctacagcaacatcatgaactttttcaagaccgagattaccctggccaacggcgagatccggaagcggcctctgatcgagacaaacggcgaaacaggcgagatcgtgtgggataagggccgggactttgccaccgtgcggaaagtgctgtctatgccccaagtgaatatcgtgaaaaagaccgaggtgcagacaggcggcttcagcaaagagtctatcctgcccaagaggaacagcgacaagctgatcgccagaaagaaggactgggaccctaagaagtacggcggcttcgacagccccaccgtggcctattctgtgctggtggtggccaaagtggaaaagggcaagtccaagaaactgaagagtgtgaaagagctgctggggatcaccatcatggaaagaagcagcttcgagaagaatcccatcgactttctggaagccaagggctacaaagaagtgaaaaaggacctgatcatcaagctgcctaagtactccctgttcgagctggaaaacggccggaagagaatgctggcctctgccggcgaactgcagaagggaaacgaactggccctgccctccaaatatgtgaacttcctgtacctggccagccactatgagaagctgaagggctcccccgaggataatgagcagaaacagctgtttgtggaacagcacaaacactacctggacgagatcatcgagcagatcagcgagttctccaagagagtgatcctggccgacgctaatctggacaaggtgctgagcgcctacaacaagcacagagacaagcctatcagagagcaggccgagaatatcatccacctgtttaccctgaccaatctgggagcccctgccgccttcaagtactttgacaccaccatcgaccggaagaggtacaccagcaccaaagaggtgctggacgccaccctgatccaccagagcatcaccggcctgtacgagacacggatcgacctgtctcagctgggaggcgacgcctatccctatgacgtgcccgattatgccagcctgggcagcggctcccccaagaaaaaacgcaaggtggaagatcctaagaaaaagcggaaagtggacggcggagggccgagctctggcgcacccccaccaagtggagggtctcctgccgggtccccaacatctactgaagaaggcaccagcgaatccgcaacgcccgagtcaggccctggtacctccacagaaccatctgaaggtagtgcgcctggttccccagctggaagccctacttccaccgaagaaggcacgtcaaccgaaccaagtgaaggatctgcccctgggaccagcactgaaccatctgagatgaacaattcccagggaagagtgaccttcgaggacgtgaccgtgaacttcacccaaggcgagtggcagagactgaaccccgagcagagaaacctgtaccgggacgtgatgctggaaaactacagcaacctggtgtccgtcggccagggcgagacaacaaagcctgacgtgatcctgcggctggaacagggcaaagagccttggctggaagaggaagaggtgctcggatctggcagagccgagaagaatggcgatatcggcggacagatctggaagccaaaggatgtgaaagagagtctcagcggcagcgagacccccggtaccagcgagagcgctacacccgaatccggccccggcagccccgccggcagccctacaagcaccgaggagggcacctccgaatccgccacccctgagagcggacccggcagcgagcctgccacaagcggcagcgagacacctggaacaagcgagagcgccacacctgaaagcggccccggaacatccaccgagcctagcgagggcagcgcccctggcacaagcacagagccttccgagagcgccacccccgagagcatgggccctatggagatatacaagacagtgtctgcatggaagagacagccagtgcgggtactgagcctcttcagaaacatcgacaaggtactaaagagtttgggcttcttggaaagcggttctggttctgggggaggaacgctgaagtacgtggaagatgtcacaaatgtcgtgaggagagacgtggagaaatggggcccctttgacctggtgtacggctcgacgcagcccctaggcagctcttgtgatcgctgtcccggctggtacatgttccagttccaccggatcctgcagtatgcgctgcctcgccaggagagtcagcggcccttcttctggatattcatggacaatctgctgctgactgaggatgaccaagagacaactacccgcttccttcagacagaggctgtgaccctccaggatgtccgtggcagagactaccagaatgctatgcgggtgtggagcaacattccagggctgaagagcaagcatgcgcccctgaccccaaaggaagaagagtatctgcaagcccaagtcagaagcaggagcaagctggacgccccgaaagttgacctcctggtgaagaactgccttctcccgctgagagagtacttcaagtatttttctcaaaactcacttcctctttctagcggcaatagtaacgctaacagccgcgggccgagcttcagcagcggcctggtgccgttgagcttgcgcggcagccatatgaaccatgaccaggaatttgaccccccaaaggtttacccacctgtgccagctgagaagaggaagcccatccgcgtgctgtctctctttgatgggattgctacagggctcctggtgctgaaggacctgggcatccaagtggaccgctacattgcctccgaggtgtgtgaggactccatcacggtgggcatggtgcggcaccagggaaagatcatgtacgtcggggacgtccgcagcgtcacacagaagcatatccaggagtggggcccattcgacctggtgattggaggcagtccctgcaatgacctctccattgtcaaccctgcccgcaagggactttatgagggtactggccgcctcttctttgagttctaccgcctcctgcatgatgcgcggcccaaggagggagatgatcgccccttcttctggctctttgagaatgtggtggccatgggcgttagtgacaagagggacatctcgcgatttcttgagtctaaccccgtgatgattgacgccaaagaagtgtctgctgcacacagggcccgttacttctggggtaaccttcctggcatgaacaggcctttggcatccactgtgaatgataagctggagctgcaagagtgtctggagcacggcagaatagccaagttcagcaaagtgaggaccattaccaccaggtcaaactctataaagcagggcaaagaccagcatttccccgtcttcatgaacgagaaggaggacatcctgtggtgcactgaaatggaaagggtgtttggcttccccgtccactacacagacgtctccaacatgagccgcttggcgaggcagagactgctgggccgatcgtggagcgtgccggtcatccgccacctcttcgctccgctgaaggaatattttgcttgtgtgtgataatagggatcccaagcacgcagcaatgcagctcaaaacgcttagcctagccacacccccacgggaaacagcagtgattaacctttagcaataaacgaaagtttaactaagctatactaaccccagggttggtcaatttcgtgccagccacaccctggtactgcatgcacgcaatgctagctgcccctttcccgtcctgggcaccccgagtctcccccgaccccgggtcccaggtatgctcccacctccacctgccccactcaccacctctgctagttccagacacctccgaagatggaaaaaaaaaaaaaaaaaaaaaaaaaaaaaaaaaaaaaaaaaaaaaaaaaaaaaaaaaaaaaaaaaaaaaaaaaaaaaaaaaaaaaaaaaaaaaaaaaaaaaaaaaaaaaaaaaaaaaaaaaaaaaaaaaaaaaaaaaaaaaaaaaaaaaaagcttggatcattgtcacatgtgagcaaaaggccagcaaaaggccaggaaccgtaaaaaggccgcgttgctggcgtttttccataggctccgcccccctgacgagcatcacaaaaatcgacgctcaagtcagaggtggcgaaacccgacaggactataaagataccaggcgtttccccctggaagctccctcgtgcgctctcctgttccgaccctgccgcttaccggatacctgtccgcctttctcccttcgggaagcgtggcgctttctcatagctcacgctgtaggtatctcagttcggtgtaggtcgttcgctccaagctgggctgtgtgcacgaaccccccgttcagcccgaccgctgcgccttatccggtaactatcgtcttgagtccaacccggtaagacacgacttatcgccactggcagcagccactggtaacaggattagcagagcgaggtatgtaggcggtgctacagagttcttgaagtggtggcctaactacggctacactagaagaacagtatttggtatctgcgctctgctgaagccagttaccttcggaaaaagagttggtagctcttgatccggcaaacaaaccaccgctggtagcggtggtttttttgtttgcaagcagcagattacgcgcagaaaaaaaggatctcaagaagatcctttgatcttttctacggggtctgacgctcagtggaacgaaaactcacgttaagggattttggtcatgagattatcaaaaaggatcttcacctagatccttttaaattaaaaatgaagttttaaatcaagcccaatctgaataatgttacaaccaattaaccaattctgattagaaaaactcatcgagcatcaaatgaaactgcaatttattcatatcaggattatcaataccatatttttgaaaaagccgtttctgtaatgaaggagaaaactcaccgaggcagttccataggatggcaagatcctggtatcggtctgcgattccgactcgtccaacatcaatacaacctattaatttcccctcgtcaaaaataaggttatcaagtgagaaatcaccatgagtgacgactgaatccggtgagaatggcaaaagtttatgcatttctttccagacttgttcaacaggccagccattacgctcgtcatcaaaatcactcgcatcaaccaaaccgttattcattcgtgattgcgcctgagcgagacgaaatacgcgatcgctgttaaaaggacaattacaaacaggaatcgaatgcaaccggcgcaggaacactgccagcgcatcaacaatattttcacctgaatcaggatattcttctaatacctggaatgctgtttttccggggatcgcagtggtgagtaaccatgcatcatcaggagtacggataaaatgcttgatggtcggaagaggcataaattccgtcagccagtttagtctgaccatctcatctgtaacatcattggcaacgctacctttgccatgtttcagaaacaactctggcgcatcgggcttcccatacaagcgatagattgtcgcacctgattgcccgacattatcgcgagcccatttatacccatataaatcagcatccatgttggaatttaatcgcggcctcgacgtttcccgttgaatatggctcataacaccccttgtattactgtttatgtaagcagacagttttattgttcatgatgatatatttttatcttgtgcaatgtaacatcagagattttgagacacgggccagagctgca

SEQ ID NO: 134 - DNA, 9068 bp, synthetic construct
  misc_feature 1..9068: note = V16 DNA
  source 1..9068: mol_type = other DNA
tttcaccgtcatcaccgaaacgcgcgatgcagctctggcccgtgtctcaaaatctctgatgttacattgcacaagataaaaatatatcatcatgaacaataaaactgtctgcttacataaacagtaatacaaggggtgttatgagccatattcaacgggaaacgtcgaggccgcgattaaattccaacatggatgctgatttatatgggtataaatgggctcgcgataatgtcgggcaatcaggtgcgacaatctatcgcttgtatgggaagcccgatgcgccagagttgtttctgaaacatggcaaaggtagcgttgccaatgatgttacagatgagatggtcagactaaactggctgacggaatttatgcctcttccgaccatcaagcattttatccgtactcctgatgatgcatggttactcaccactgcgatccccggaaaaacagcattccaggtattagaagaatatcctgattcaggtgaaaatattgttgatgcgctggcagtgttcctgcgccggttgcattcgattcctgtttgtaattgtccttttaacagcgatcgcgtatttcgtctcgctcaggcgcaatcacgaatgaataacggtttggttgatgcgagtgattttgatgacgagcgtaatggctggcctgttgaacaagtctggaaagaaatgcataaacttttgccattctcaccggattcagtcgtcactcatggtgatttctcacttgataaccttatttttgacgaggggaaattaataggttgtattgatgttggacgagtcggaatcgcagaccgataccaggatcttgccatcctatggaactgcctcggtgagttttctccttcattacagaaacggctttttcaaaaatatggtattgataatcctgatatgaataaattgcagtttcatttgatgctcgatgagtttttctaatcagaattggttaattggttgtaacattattcagattgggcttgatttaaaacttcatttttaatttaaaaggatctaggtgaagatcctttttgataatctcatgaccaaaatcccttaacgtgagttttcgttccactgagcgtcagaccccgtagaaaagatcaaaggatcttcttgagatcctttttttctgcgcgtaatctgctgcttgcaaacaaaaaaaccaccgctaccagcggtggtttgtttgccggatcaagagctaccaactctttttccgaaggtaactggcttcagcagagcgcagataccaaatactgttcttctagtgtagccgtagttaggccaccacttcaagaactctgtagcaccgcctacatacctcgctctgctaatcctgttaccagtggctgctgccagtggcgataagtcgtgtcttaccgggttggactcaagacgatagttaccggataaggcgcagcggtcgggctgaacggggggttcgtgcacacagcccagcttggagcgaacgacctacaccgaactgagatacctacagcgtgagctatgagaaagcgccacgcttcccgaagggagaaaggcggacaggtatccggtaagcggcagggtcggaacaggagagcgcacgagggagcttccagggggaaacgcctggtatctttatagtcctgtcgggtttcgccacctctgacttgagcgtcgatttttgtgatgctcgtcaggggggcggagcctatggaaaaacgccagcaacgcggcctttttacggttcctggccttttgctggccttttgctcacatacctctgacacatgcagctcccggacgtcattgtcgattagctttctagataatacgactcactataaggactcactatttgttttcgcgcccagttgcaaaaagtgtcgacatttgcttctgacacaactgtgttcactagcaacctcaaacagacaccgccaccatggtccctgctgctaagagagtgaaactggatggatccgacaagaagtacagcatcggcctggccatcggcaccaactctgtgggctgggccgtgatcaccgacgagtacaaggtgcccagcaagaaattcaaggtgctgggcaacaccgaccggcacagcatcaagaagaacctgatcggcgccctgctgttcgacagcggagaaacagccgaggccacccggctgaagagaaccgccagaagaagatacaccagacggaagaaccggatctgctatctgcaagagatcttcagcaacgagatggccaaggtggacgacagcttcttccacagactggaagagtccttcctggtggaagaggataagaagcacgagcggcaccccatcttcggcaacatcgtggacgaggtggcctaccacgagaagtaccccaccatctaccacctgagaaagaaactggtggacagcaccgacaaggccgacctgcggctgatctatctggccctggcccacatgatcaagttccggggccacttcctgatcgagggcgacctgaaccccgacaacagcgacgtggacaagctgttcatccagctggtgcagacctacaaccagctgttcgaggaaaaccccatcaacgccagcggcgtggacgccaaggccatcctgtctgccagactgagcaagagcagacggctggaaaatctgatcgcccagctgcccggcgagaagaagaatggcctgttcggcaacctgattgccctgagcctgggcctgacccccaacttcaagagcaacttcgacctggccgaggatgccaaactgcagctgagcaaggacacctacgacgacgacctggacaacctgctggcccagatcggcgaccagtacgccgacctgtttctggccgccaagaacctgtccgacgccatcctgctgagcgacatcctgagagtgaacaccgagatcaccaaggcccccctgagcgcctctatgatcaagagatacgacgagcaccaccaggacctgaccctgctgaaagctctcgtgcggcagcagctgcctgagaagtacaaagagattttcttcgaccagagcaagaacggctacgccggctacatcgatggcggagccagccaggaagagttctacaagttcatcaagcccatcctggaaaagatggacggcaccgaggaactgctcgtgaagctgaacagagaggacctgctgcggaagcagcggaccttcgacaacggcagcatcccccaccagatccacctgggagagctgcacgccattctgcggcggcaggaagatttttacccattcctgaaggacaaccgggaaaagatcgagaagatcctgaccttccgcatcccctactacgtgggccctctggccaggggaaacagcagattcgcctggatgaccagaaagagcgaggaaaccatcaccccctggaacttcgaggaagtggtggacaagggcgccagcgcccagagcttcatcgagcggatgaccaacttcgataagaacctgcccaacgagaaggtgctgcccaagcacagcctgctgtacgagtacttcaccgtgtacaacgagctgaccaaagtgaaatacgtgaccgagggaatgagaaagcccgccttcctgagcggcgagcagaaaaaagccatcgtggacctgctgttcaagaccaaccggaaagtgaccgtgaagcagctgaaagaggactacttcaagaaaatcgagtgcttcgactccgtggaaatctccggcgtggaagatcggttcaacgcctccctgggcacataccacgatctgctgaaaattatcaaggacaaggacttcctggacaatgaggaaaacgaggacattctggaagatatcgtgctgaccctgacactgtttgaggacagagagatgatcgaggaacggctgaaaacctatgcccacctgttcgacgacaaagtgatgaagcagctgaagcggcggagatacaccggctggggcaggctgagccggaagctgatcaacggcatccgggacaagcagtccggcaagacaatcctggatttcctgaagtccgacggcttcgccaacagaaacttcatgcagctgatccacgacgacagcctgacctttaaagaggacatccagaaagcccaggtgtccggccagggcgatagcctgcacgagcacattgccaatctggccggcagccccgccattaagaagggcatcctgcagacagtgaaggtggtggacgagctcgtgaaagtgatgggccggcacaagcccgagaacatcgtgatcgaaatggccagagagaaccagaccacccagaagggacagaagaacagccgcgagagaatgaagcggatcgaagagggcatcaaagagctgggcagccagatcctgaaagaacaccccgtggaaaacacccagctgcagaacgagaagctgtacctgtactacctgcagaatgggcgggatatgtacgtggaccaggaactggacatcaaccggctgtccgactacgatgtggacgctatcgtgcctcagagctttctgaaggacgactccatcgataacaaagtgctgactcggagcgacaagaaccggggcaagagcgacaacgtgccctccgaagaggtcgtgaagaagatgaagaactactggcgccagctgctgaatgccaagctgattacccagaggaagttcgacaatctgaccaaggccgagagaggcggcctgagcgaactggataaggccggcttcatcaagagacagctggtggaaacccggcagatcacaaagcacgtggcacagatcctggactcccggatgaacactaagtacgacgagaacgacaaactgatccgggaagtgaaagtgatcaccctgaagtccaagctggtgtccgatttccggaaggatttccagttttacaaagtgcgcgagatcaacaactaccaccacgcccacgacgcctacctgaacgccgtcgtgggaaccgccctgatcaaaaagtaccctaagctggaaagcgagttcgtgtacggcgactacaaggtgtacgacgtgcggaagatgatcgccaagagcgagcaggaaatcggcaaggctaccgccaagtacttcttctacagcaacatcatgaactttttcaagaccgagattaccctggccaacggcgagatccggaagcggcctctgatcgagacaaacggcgaaacaggcgagatcgtgtgggataagggccgggactttgccaccgtgcggaaagtgctgtctatgccccaagtgaatatcgtgaaaaagaccgaggtgcagacaggcggcttcagcaaagagtctatcctgcccaagaggaacagcgacaagctgatcgccagaaagaaggactgggaccctaagaagtacggcggcttcgacagccccaccgtggcctattctgtgctggtggtggccaaagtggaaaagggcaagtccaagaaactgaagagtgtgaaagagctgctggggatcaccatcatggaaagaagcagcttcgagaagaatcccatcgactttctggaagccaagggctacaaagaagtgaaaaaggacctgatcatcaagctgcctaagtactccctgttcgagctggaaaacggccggaagagaatgctggcctctgccggcgaactgcagaagggaaacgaactggccctgccctccaaatatgtgaacttcctgtacctggccagccactatgagaagctgaagggctcccccgaggataatgagcagaaacagctgtttgtggaacagcacaaacactacctggacgagatcatcgagcagatcagcgagttctccaagagagtgatcctggccgacgctaatctggacaaggtgctgagcgcctacaacaagcacagagacaagcctatcagagagcaggccgagaatatcatccacctgtttaccctgaccaatctgggagcccctgccgccttcaagtactttgacaccaccatcgaccggaagaggtacaccagcaccaaagaggtgctggacgccaccctgatccaccagagcatcaccggcctgtacgagacacggatcgacctgtctcagctgggaggcgacgcctatccctatgacgtgcccgattatgccagcctgggcagcggctcccccaagaaaaaacgcaaggtggaagatcctaagaaaaagcggaaagtggacggcggagggccgagctctggcgcacccccaccaagtggagggtctcctgccgggtccccaacatctactgaagaaggcaccagcgaatccgcaacgcccgagtcaggccctggtacctccacagaaccatctgaaggtagtgcgcctggttccccagctggaagccctacttccaccgaagaaggcacgtcaaccgaaccaagtgaaggatctgcccctgggaccagcactgaaccatctgagatgaacaattcccagggaagagtgaccttcgaggacgtgaccgtgaacttcacccaaggcgagtggcagagactgaaccccgagcagagaaacctgtaccgggacgtgatgctggaaaactacagcaacctggtgtccgtcggccagggcgagacaacaaagcctgacgtgatcctgcggctggaacagggcaaagagccttggctggaagaggaagaggtgctcggatctggcagagccgagaagaatggcgatatcggcggacagatctggaagccaaaggatgtgaaagagagtctcagcggcagcgagacccccggtaccagcgagggcggccctagcagcggcgcccctccccctagcggcggcagccctgccggatcccctacaagcaccgaagaaggcacaagcgagtccgctacccctgagtccggccctggcacctccacagagcctagcgagggatccgctcctggatcccctgccggaagccctacctccaccgaggagggcacaagcaccgagccttccgagggcagcgcccccggaacaagcaccgaacctagcgagagcgccacccccgagagcatgttcgaaaccgtgcctgtgtggaggagacagccagtccgggtgctgtccctttttgaagacatcaagaaagagctgacgagtttgggctttttggaaagtggttctgacccgggacaactgaagcatgtggttgatgtcacagacacagtgaggaaggatgtggaggagtggggacccttcgatcttgtgtacggcgccacacctcccctgggccacacctgtgaccgtcctcccagctggtacctgttccagttccaccggctcctgcagtacgcacggcccaagccaggcagccccaggcccttcttctggatgttcgtggacaatctggtgctgaacaaggaagacctggacgtcgcatctcgcttcctggagatggagccagtcaccatcccagatgtccacggcggatccttgcagaatgctgtccgcgtgtggagcaacatcccagccataaggagcagcaggcactgggctctggtttcggaagaagaattgtccctgctggcccagaacaagcagagctcgaagctcgcggccaagtggcccaccaagctggtgaagaactgctttctccccctaagagaatatttcaagtatttttcaacagaactcacttcctctttatctagcggcaatagtaacgctaacagccgcgggccgagcttcagcagcggcctggtgccgttgagcttgcgcggcagccatatgaaccatgaccaggaatttgaccccccaaaggtttacccacctgtgccagctgagaagaggaagcccatccgcgtgctgtctctctttgatgggattgctacagggctcctggtgctgaaggacctgggcatccaagtggaccgctacattgcctccgaggtgtgtgaggactccatcacggtgggcatggtgcggcaccagggaaagatcatgtacgtcggggacgtccgcagcgtcacacagaagcatatccaggagtggggcccattcgacctggtgattggaggcagtccctgcaatgacctctccattgtcaaccctgcccgcaagggactttatgagggtactggccgcctcttctttgagttctaccgcctcctgcatgatgcgcggcccaaggagggagatgatcgccccttcttctggctctttgagaatgtggtggccatgggcgttagtgacaagagggacatctcgcgatttcttgagtctaaccccgtgatgattgacgccaaagaagtgtctgctgcacacagggcccgttacttctggggtaaccttcctggcatgaacaggcctttggcatccactgtgaatgataagctggagctgcaagagtgtctggagcacggcagaatagccaagttcagcaaagtgaggaccattaccaccaggtcaaactctataaagcagggcaaagaccagcatttccccgtcttcatgaacgagaaggaggacatcctgtggtgcactgaaatggaaagggtgtttggcttccccgtccactacacagacgtctccaacatgagccgcttggcgaggcagagactgctgggccgatcgtggagcgtgccggtcatccgccacctcttcgctccgctgaaggaatattttgcttgtgtgtgataatagggatcccaagcacgcagcaatgcagctcaaaacgcttagcctagccacacccccacgggaaacagcagtgattaacctttagcaataaacgaaagtttaactaagctatactaaccccagggttggtcaatttcgtgccagccacaccctggtactgcatgcacgcaatgctagctgcccctttcccgtcctgggcaccccgagtctcccccgaccccgggtcccaggtatgctcccacctccacctgccccactcaccacctctgctagttccagacacctccgaagatggaaaaaaaaaaaaaaaaaaaaaaaaaaaaaaaaaaaaaaaaaaaaaaaaaaaaaaaaaaaaaaaaaaaaaaaaaaaaaaaaaaaaaaaaaaaaaaaaaaaaaaaaaaaaaaaaaaaaaaaaaagcttggatcattgtcac

SEQ ID NO: 135 - DNA, 9770 bp, synthetic construct
  misc_feature 1..9770: note = V17 DNA
  source 1..9770: mol_type = other DNA
gagatacctacagcgtgagctatgagaaagcgccacgcttcccgaagggagaaaggcggacaggtatccggtaagcggcagggtcggaacaggagagcgcacgagggagcttccagggggaaacgcctggtatctttatagtcctgtcgggtttcgccacctctgacttgagcgtcgatttttgtgatgctcgtcaggggggcggagcctatggaaaaacgccagcaacgcggcctttttacggttcctggccttttgctggccttttgctcacatgttctttcctgcgttatcccctgattctgtggataaccgtattaccgcctttgagtgagctgataccgctcgccgcagccgaacgaccgagcgcagcgagtcagtgagcgaggaagcggaagagcgcccaatacgcaaaccgcctctccccgcgcgttggccgattcattaatgcagctggcacgacaggtttcccgactggaaagcgggcagtgagcgcaacgcaattaatgtgagttagctcactcattaggcaccccaggctttacactttatgcttccggctcgtatgttgtgtggaattgtgagcggataacaatttcacacaggaaacagctatgaccatgattacgcctctagaaagctttaatacgactcactataaggactcactatttgttttcgcgcccagttgcaaaaagtgtcgacatttgcttctgacacaactgtgttcactagcaacctcaaacagacaccgccaccatgcctgctgctaagagagtgaaactggatggatccaaccatgaccaggaatttgaccccccaaaggtttacccacctgtgccagctgagaagaggaagcccatccgcgtgctgtctctctttgatgggattgctacagggctcctggtgctgaaggacctgggcatccaagtggaccgctacattgcctccgaggtgtgtgaggactccatcacggtgggcatggtgcggcaccagggaaagatcatgtacgtcggggacgtccgcagcgtcacacagaagcatatccaggagtggggcccattcgacctggtgattggaggcagtccctgcaatgacctctccattgtcaaccctgcccgcaagggactttatgagggtactggccgcctcttctttgagttctaccgcctcctgcatgatgcgcggcccaaggagggagatgatcgccccttcttctggctctttgagaatgtggtggccatgggcgttagtgacaagagggacatctcgcgatttcttgagtctaaccccgtgatgattgacgccaaagaagtgtctgctgcacacagggcccgttacttctggggtaaccttcctggcatgaacaggcctttggcatccactgtgaatgataagctggagctgcaagagtgtctggagcacggcagaatagccaagttcagcaaagtgaggaccattaccaccaggtcaaactctataaagcagggcaaagaccagcatttccccgtgttcatgaacgagaaggaggacatcctgtggtgcactgaaatggaaagggtgtttggcttccccgtccactacacagacgtctccaacatgagccgcttggcgaggcagagactgctgggccgatcgtggagcgtgccggtcatccgccacctcttcgctccgctgaaggaatattttgcttgtgtgtctagcggcaatagtaacgctaacagccgcgggccgagcttcagcagcggcctggtgccgttaagcttgcgcggcagccatatgggccctatggagatatacaagacagtgtctgcatggaagagacagccagtgcgggtactgagcctcttcagaaacatcgacaaggtactaaagagtttgggcttcttggaaagcggttctggttctgggggaggaacgctgaagtacgtggaagatgtcacaaatgtcgtgaggagagacgtggagaaatggggcccctttgacctggtgtacggctcgacgcagcccctaggcagctcttgtgatcgctgtcccggctggtacatgttccagttccaccggatcctgcagtatgcgctgcctcgccaggagagtcagcggcccttcttctggatattcatggacaatctgctgctgactgaggatgaccaagagacaactacccgcttccttcagacagaggctgtgaccctccaggatgtccgtggcagagactaccagaatgctatgcgggtgtggagcaacattccagggctgaagagcaagcatgcgcccctgaccccaaaggaagaagagtatctgcaagcccaagtcagaagcaggagcaagctggacgccccgaaagttgacctcctggtgaagaactgccttctcccgctgagagagtacttcaagtatttttctcaaaactcacttcctcttggagggccgagctctggcgcacccccaccaagtggagggtctcctgccgggtccccaacatctactgaagaaggcaccagcgaatccgcaacgcccgagtcaggccctggtacctccacagaaccatctgaaggtagtgcgcctggttccccagctggaagccctacttccaccgaagaaggcacgtcaaccgaaccaagtgaaggatctgcccctgggaccagcactgaaccatctgagccaaaaaagaagagaaaggtaatggacaagaagtacagcatcggcctggccatcggcaccaactctgtgggctgggccgtgatcaccgacgagtacaaggtgcccagcaagaaattcaaggtgctgggcaacaccgaccggcacagcatcaagaagaacctgatcggcgccctgctgttcgacagcggagaaacagccgaggccacccggctgaagagaaccgccagaagaagatacaccagacggaagaaccggatctgctatctgcaagagatcttcagcaacgagatggccaaggtggacgacagcttcttccacagactggaagagtccttcctggtggaagaggataagaagcacgagcggcaccccatcttcggcaacatcgtggacgaggtggcctaccacgagaagtaccccaccatctaccacctgagaaagaaactggtggacagcaccgacaaggccgacctgcggctgatctatctggccctggcccacatgatcaagttccggggccacttcctgatcgagggcgacctgaaccccgacaacagcgacgtggacaagctgttcatccagctggtgcagacctacaaccagctgttcgaggaaaaccccatcaacgccagcggcgtggacgccaaggccatcctgtctgccagactgagcaagagcagacggctggaaaatctgatcgcccagctgcccggcgagaagaagaatggcctgttcggcaacctgattgccctgagcctgggcctgacccccaacttcaagagcaacttcgacctggccgaggatgccaaactgcagctgagcaaggacacctacgacgacgacctggacaacctgctggcccagatcggcgaccagtacgccgacctgtttctggccgccaagaacctgtccgacgccatcctgctgagcgacatcctgagagtgaacaccgagatcaccaaggcccccctgagcgcctctatgatcaagagatacgacgagcaccaccaggacctgaccctgctgaaagctctcgtgcggcagcagctgcctgagaagtacaaagagattttcttcgaccagagcaagaacggctacgccggctacatcgatggcggagccagccaggaagagttctacaagttcatcaagcccatcctggaaaagatggacggcaccgaggaactgctcgtgaagctgaacagagaggacctgctgcggaagcagcggaccttcgacaacggcagcatcccccaccagatccacctgggagagctgcacgccattctgcggcggcaggaagatttttacccattcctgaaggacaaccgggaaaagatcgagaagatcctgaccttccgcatcccctactacgtgggccctctggccaggggaaacagcagattcgcctggatgaccagaaagagcgaggaaaccatcaccccctggaacttcgaggaagtggtggacaagggcgccagcgcccagagcttcatcgagcggatgaccaacttcgataagaacctgcccaacgagaaggtgctgcccaagcacagcctgctgtacgagtacttcaccgtgtacaacgagctgaccaaagtgaaatacgtgaccgagggaatgagaaagcccgccttcctgagcggcgagcagaaaaaagccatcgtggacctgctgttcaagaccaaccggaaagtgaccgtgaagcagctgaaagaggactacttcaagaaaatcgagtgcttcgactccgtggaaatctccggcgtggaagatcggttcaacgcctccctgggcacataccacgatctgctgaaaattatcaaggacaaggacttcctggacaatgaggaaaacgaggacattctggaagatatcgtgctgaccctgacactgtttgaggacagagagatgatcgaggaacggctgaaaacctatgcccacctgttcgacgacaaagtgatgaagcagctgaagcggcggagatacaccggctggggcaggctgagccggaagctgatcaacggcatccgggacaagcagtccggcaagacaatcctggatttcctgaagtccgacggcttcgccaacagaaacttcatgcagctgatccacgacgacagcctgacctttaaagaggacatccagaaagcccaggtgtccggccagggcgatagcctgcacgagcacattgccaatctggccggcagccccgccattaagaagggcatcctgcagacagtgaaggtggtggacgagctcgtgaaagtgatgggccggcacaagcccgagaacatcgtgatcgaaatggccagagagaaccagaccacccagaagggacagaagaacagccgcgagagaatgaagcggatcgaagagggcatcaaagagctgggcagccagatcctgaaagaacaccccgtggaaaacacccagctgcagaacgagaagctgtacctgtactacctgcagaatgggcgggatatgtacgtggaccaggaactggacatcaaccggctgtccgactacgatgtggacgctatcgtgcctcagagctttctgaaggacgactccatcgataacaaagtgctgactcggagcgacaagaaccggggcaagagcgacaacgtgccctccgaagaggtcgtgaagaagatgaagaactactggcgccagctgctgaatgccaagctgattacccagaggaagttcgacaatctgaccaaggccgagagaggcggcctgagcgaactggataaggccggcttcatcaagagacagctggtggaaacccggcagatcacaaagcacgtggcacagatcctggactcccggatgaacactaagtacgacgagaacgacaaactgatccgggaagtgaaagtgatcaccctgaagtccaagctggtgtccgatttccggaaggatttccagttttacaaagtgcgcgagatcaacaactaccaccacgcccacgacgcctacctgaacgccgtcgtgggaaccgccctgatcaaaaagtaccctaagctggaaagcgagttcgtgtacggcgactacaaggtgtacgacgtgcggaagatgatcgccaagagcgagcaggaaatcggcaaggctaccgccaagtacttcttctacagcaacatcatgaactttttcaagaccgagattaccctggccaacggcgagatccggaagcggcctctgatcgagacaaacggcgaaacaggcgagatcgtgtgggataagggccgggactttgccaccgtgcggaaagtgctgtctatgccccaagtgaatatcgtgaaaaagaccgaggtgcagacaggcggcttcagcaaagagtctatcctgcccaagaggaacagcgacaagctgatcgccagaaagaaggactgggaccctaagaagtacggcggcttcgacagccccaccgtggcctattctgtgctggtggtggccaaagtggaaaagggcaagtccaagaaactgaagagtgtgaaagagctgctggggatcaccatcatggaaagaagcagcttcgagaagaatcccatcgactttctggaagccaagggctacaaagaagtgaaaaaggacctgatcatcaagctgcctaagtactccctgttcgagctggaaaacggccggaagagaatgctggcctctgccggcgaactgcagaagggaaacgaactggccctgccctccaaatatgtgaacttcctgtacctggccagccactatgagaagctgaagggctcccccgaggataatgagcagaaacagctgtttgtggaacagcacaaacactacctggacgagatcatcgagcagatcagcgagttctccaagagagtgatcctggccgacgctaatctggacaaggtgctgagcgcctacaacaagcacagagacaagcctatcagagagcaggccgagaatatcatccacctgtttaccctgaccaatctgggagcccctgccgccttcaagtactttgacaccaccatcgaccggaagaggtacaccagcaccaaagaggtgctggacgccaccctgatccaccagagcatcaccggcctgtacgagacacggatcgacctgtctcagctgggaggcgacgcctatccctatgacgtgcccgattatgccagcctgggcagcggctcccccaagaaaaaacgcaaggtggaagatcctaagaaaaagcggaaagtggacggcagcggcagcgagacccccggtaccagcgagagcgccacccccgagagcatgaacaattcccagggaagagtgaccttcgaggatgtcactgtgaacttcacccagggggagtggcagcggctgaatcccgaacagagaaacttgtacagggatgtgatgctggagaattacagcaaccttgtctctgtgggacaaggggaaaccaccaaacccgatgtgatcttgaggttggaacaaggaaaggagccatggttggaggaagaggaagtgctgggaagtggccgtgcagaaaaaaatggggacattggagggcagatttggaagccaaaggatgtgaaagagagtctcctcgagtgataatagggatcccaagcacgcagcaatgcagctcaaaacgcttagcctagccacacccccacgggaaacagcagtgattaacctttagcaataaacgaaagtttaactaagctatactaaccccagggttggtcaatttcgtgccagccacaccctggtactgcatgcacgcaatgctagctgcccctttcccgtcctgggcaccccgagtctcccccgaccccgggtcccaggtatgctcccacctccacctgccccactcaccacctctgctagttccagacacctccgagacgaggaaaaaaaaaaaaaaaaaaaaaaaaaaaaaaaaaaaaaaaaaaaaaaaaaaaaaaaaaaaaaaaaaaaaaaaaaaaaaaaaaaaaaaaaaaaaaaaaaaaaaaaaaaaaaaaaaaaaaaaaaaaaaaaaaaaaaaaaaaaaaaaaaaaaaaaaaaaaaaaaaaaaaaaaaaaaaaaaaaaaaaaaaaaaaaaaaaaaaaaaccgtcttcaagctttctagaaattcactggccgtcgttttacaacgtcgtgactgggaaaaccctggcgttacccaacttaatcgccttgcagcacatccccctttcgccagctggcgtaatagcgaagaggcccgcaccgatcgcccttcccaacagttgcgcagcctgaatggcgaatggcgcctgatgcggtattttctccttacgcatctgtgcggtatttcacaccgcatatggtgcactctcagtacaatctgctctgatgccgcatagttaagccagccccgacacccgccaacacccgctgacgcgccctgacgggcttgtctgctcccggcatccgcttacagacaagctgtgaccgtctccgggagctgcatgtgtcagaggttttcaccgtcatcaccgaaacgcgcgagacgaaagggcctcgtgatacgcctatttttataggttaatgtcatgataataatggtttcttagacgtcaggtggcacttttcggggaaatgtgcgcggaacccctatttgtttatttttctaaatacattcaaatatgtatccgctcatgagacaataaccctgataaatgcttcaataatattgaaaaaggaagagtatgagtattcaacatttccgtgtcgcccttattcccttttttgcggcattttgccttcctgtttttgctcacccagaaacgctggtgaaagtaaaagatgctgaagatcagttgggtgcacgagtgggttacatcgaactggatctcaacagcggtaagatccttgagagttttcgccccgaagaacgttttccaatgatgagcacttttaaagttctgctatgtggcgcggtattatcccgtattgacgccgggcaagagcaactcggtcgccgcatacactattctcagaatgacttggttgagtactcaccagtcacagaaaagcatcttacggatggcatgacagtaagagaattatgcagtgctgccataaccatgagtgataacactgcggccaacttacttctgacaacgatcggaggaccgaaggagctaaccgcttttttgcacaacatgggggatcatgtaactcgccttgatcgttgggaaccggagctgaatgaagccataccaaacgacgagcgtgacaccacgatgcctgtagcaatggcaacaacgttgcgcaaactattaactggcgaactacttactctagcttcccggcaacaattaatagactggatggaggcggataaagttgcaggaccacttctgcgctcggcccttccggctggctggtttattgctgataaatctggagccggtgagcgtgggtctcgcggtatcattgcagcactggggccagatggtaagccctcccgtatcgtagttatctacacgacggggagtcaggcaactatggatgaacgaaatagacagatcgctgagataggtgcctcactgattaagcattggtaactgtcagaccaagtttactcatatatactttagattgatttaaaacttcatttttaatttaaaaggatctaggtgaagatcctttttgataatctcatgaccaaaatcccttaacgtgagttttcgttccactgagcgtcagaccccgtagaaaagatcaaaggatcttcttgagatcctttttttctgcgcgtaatctgctgcttgcaaacaaaaaaaccaccgctaccagcggtggtttgtttgccggatcaagagctaccaactctttttccgaaggtaactggcttcagcagagcgcagataccaaatactgttcttctagtgtagccgtagttaggccaccacttcaagaactctgtagcaccgcctacatacctcgctctgctaatcctgttaccagtggctgctgccagtggcgataagtcgtgtcttaccgggttggactcaagacgatagttaccggataaggcgcagcggtcgggctgaacggggggttcgtgcacacagcccagcttggagcgaacgacctacaccgaact

SEQ ID NO: 136 - DNA, 9607 bp, synthetic construct
  misc_feature 1..9607: note = V18 DNA
  source 1..9607: mol_type = other DNA
gagatacctacagcgtgagctatgagaaagcgccacgcttcccgaagggagaaaggcggacaggtatccggtaagcggcagggtcggaacaggagagcgcacgagggagcttccagggggaaacgcctggtatctttatagtcctgtcgggtttcgccacctctgacttgagcgtcgatttttgtgatgctcgtcaggggggcggagcctatggaaaaacgccagcaacgcggcctttttacggttcctggccttttgctggccttttgctcacatgttctttcctgcgttatcccctgattctgtggataaccgtattaccgcctttgagtgagctgataccgctcgccgcagccgaacgaccgagcgcagcgagtcagtgagcgaggaagcggaagagcgcccaatacgcaaaccgcctctccccgcgcgttggccgattcattaatgcagctggcacgacaggtttcccgactggaaagcgggcagtgagcgcaacgcaattaatgtgagttagctcactcattaggcaccccaggctttacactttatgcttccggctcgtatgttgtgtggaattgtgagcggataacaatttcacacaggaaacagctatgaccatgattacgcctctagaaagctttaatacgactcactataaggactcactatttgttttcgcgcccagttgcaaaaagtgtcgacatttgcttctgacacaactgtgttcactagcaacctcaaacagacaccgccaccatgcctgctgctaagagagtgaaactggatggatccaaccatgaccaggaatttgaccccccaaaggtttacccacctgtgccagctgagaagaggaagcccatccgcgtgctgtctctctttgatgggattgctacagggctcctggtgctgaaggacctgggcatccaagtggaccgctacattgcctccgaggtgtgtgaggactccatcacggtgggcatggtgcggcaccagggaaagatcatgtacgtcggggacgtccgcagcgtcacacagaagcatatccaggagtggggcccattcgacctggtgattggaggcagtccctgcaatgacctctccattgtcaaccctgcccgcaagggactttatgagggtactggccgcctcttctttgagttctaccgcctcctgcatgatgcgcggcccaaggagggagatgatcgccccttcttctggctctttgagaatgtggtggccatgggcgttagtgacaagagggacatctcgcgatttcttgagtctaaccccgtgatgattgacgccaaagaagtgtctgctgcacacagggcccgttacttctggggtaaccttcctggcatgaacaggcctttggcatccactgtgaatgataagctggagctgcaagagtgtctggagcacggcagaatagccaagttcagcaaagtgaggaccattaccaccaggtcaaactctataaagcagggcaaagaccagcatttccccgtgttcatgaacgagaaggaggacatcctgtggtgcactgaaatggaaagggtgtttggcttccccgtccactacacagacgtctccaacatgagccgcttggcgaggcagagactgctgggccgatcgtggagcgtgccggtcatccgccacctcttcgctccgctgaaggaatattttgcttgtgtgtctagcggcaatagtaacgctaacagccgcgggccgagcttcagcagcggcctggtgccgttaagcttgcgcggcagccatatgttcgaaaccgtgcctgtgtggaggagacagccagtccgggtgctgtccctttttgaagacatcaagaaagagctgacgagtttgggctttttggaaagtggttctgacccgggacaactgaagcatgtggttgatgtcacagacacagtgaggaaggatgtggaggagtggggacccttcgatcttgtgtacggcgccacacctcccctgggccacacctgtgaccgtcctcccagctggtacctgttccagttccaccggctcctgcagtacgcacggcccaagccaggcagccccaggcccttcttctggatgttcgtggacaatctggtgctgaacaaggaagacctggacgtcgcatctcgcttcctggagatggagccagtcaccatcccagatgtccacggcggatccttgcagaatgctgtccgcgtgtggagcaacatcccagccataaggagcagcaggcactgggctctggtttcggaagaagaattgtccctgctggcccagaacaagcagagctcgaagctcgcggccaagtggcccaccaagctggtgaagaactgctttctccccctaagagaatatttcaagtatttttcaggagggccgagctctggcgcacccccaccaagtggagggtctcctgccgggtccccaacatctactgaagaaggcaccagcgaatccgcaacgcccgagtcaggccctggtacctccacagaaccatctgaaggtagtgcgcctggttccccagctggaagccctacttccaccgaagaaggcacgtcaaccgaaccaagtgaaggatctgcccctgggaccagcactgaaccatctgagccaaaaaagaagagaaaggtaatggacaagaagtacagcatcggcctggccatcggcaccaactctgtgggctgggccgtgatcaccgacgagtacaaggtgcccagcaagaaattcaaggtgctgggcaacaccgaccggcacagcatcaagaagaacctgatcggcgccctgctgttcgacagcggagaaacagccgaggccacccggctgaagagaaccgccagaagaagatacaccagacggaagaaccggatctgctatctgcaagagatcttcagcaacgagatggccaaggtggacgacagcttcttccacagactggaagagtccttcctggtggaagaggataagaagcacgagcggcaccccatcttcggcaacatcgtggacgaggtggcctaccacgagaagtaccccaccatctaccacctgagaaagaaactggtggacagcaccgacaaggccgacctgcggctgatctatctggccctggcccacatgatcaagttccggggccacttcctgatcgagggcgacctgaaccccgacaacagcgacgtggacaagctgttcatccagctggtgcagacctacaaccagctgttcgaggaaaaccccatcaacgccagcggcgtggacgccaaggccatcctgtctgccagactgagcaagagcagacggctggaaaatctgatcgcccagctgcccggcgagaagaagaatggcctgttcggcaacctgattgccctgagcctgggcctgacccccaacttcaagagcaacttcgacctggccgaggatgccaaactgcagctgagcaaggacacctacgacgacgacctggacaacctgctggcccagatcggcgaccagtacgccgacctgtttctggccgccaagaacctgtccgacgccatcctgctgagcgacatcctgagagtgaacaccgagatcaccaaggcccccctgagcgcctctatgatcaagagatacgacgagcaccaccaggacctgaccctgctgaaagctctcgtgcggcagcagctgcctgagaagtacaaagagattttcttcgaccagagcaagaacggctacgccggctacatcgatggcggagccagccaggaagagttctacaagttcatcaagcccatcctggaaaagatggacggcaccgaggaactgctcgtgaagctgaacagagaggacctgctgcggaagcagcggaccttcgacaacggcagcatcccccaccagatccacctgggagagctgcacgccattctgcggcggcaggaagatttttacccattcctgaaggacaaccgggaaaagatcgagaagatcctgaccttccgcatcccctactacgtgggccctctggccaggggaaacagcagattcgcctggatgaccagaaagagcgaggaaaccatcaccccctggaacttcgaggaagtggtggacaagggcgccagcgcccagagcttcatcgagcggatgaccaacttcgataagaacctgcccaacgagaaggtgctgcccaagcacagcctgctgtacgagtacttcaccgtgtacaacgagctgaccaaagtgaaatacgtgaccgagggaatgagaaagcccgccttcctgagcggcgagcagaaaaaagccatcgtggacctgctgttcaagaccaaccggaaagtgaccgtgaagcagctgaaagaggactacttcaagaaaatcgagtgcttcgactccgtggaaatctccggcgtggaagatcggttcaacgcctccctgggcacataccacgatctgctgaaaattatcaaggacaaggacttcctggacaatgaggaaaacgaggacattctggaagatatcgtgctgaccctgacactgtttgaggacagagagatgatcgaggaacggctgaaaacctatgcccacctgttcgacgacaaagtgatgaagcagctgaagcggcggagatacaccggctggggcaggctgagccggaagctgatcaacggcatccgggacaagcagtccggcaagacaatcctggatttcctgaagtccgacggcttcgccaacagaaacttcatgcagctgatccacgacgacagcctgacctttaaagaggacatccagaaagcccaggtgtccggccagggcgatagcctgcacgagcacattgccaatctggccggcagccccgccattaagaagggcatcctgcagacagtgaaggtggtggacgagctcgtgaaagtgatgggccggcacaagcccgagaacatcgtgatcgaaatggccagagagaaccagaccacccagaagggacagaagaacagccgcgagagaatgaagcggatcgaagagggcatcaaagagctgggcagccagatcctgaaagaacaccccgtggaaaacacccagctgcagaacgagaagctgtacctgtactacctgcagaatgggcgggatatgtacgtggaccaggaactggacatcaaccggctgtccgactacgatgtggacgctatcgtgcctcagagctttctgaaggacgactccatcgataacaaagtgctgactcggagcgacaagaaccggggcaagagcgacaacgtgccctccgaagaggtcgtgaagaagatgaagaactactggcgccagctgctgaatgccaagctgattacccagaggaagttcgacaatctgaccaaggccgagagaggcggcctgagcgaactggataaggccggcttcatcaagagacagctggtggaaacccggcagatcacaaagcacgtggcacagatcctggactcccggatgaacactaagtacgacgagaacgacaaactgatccgggaagtgaaagtgatcaccctgaagtccaagctggtgtccgatttccggaaggatttccagttttacaaagtgcgcgagatcaacaactaccaccacgcccacgacgcctacctgaacgccgtcgtgggaaccgccctgatcaaaaagtaccctaagctggaaagcgagttcgtgtacggcgactacaaggtgtacgacgtgcggaagatgatcgccaagagcgagcaggaaatcggcaaggctaccgccaagtacttcttctacagcaacatcatgaactttttcaagaccgagattaccctggccaacggcgagatccggaagcggcctctgatcgagacaaacggcgaaacaggcgagatcgtgtgggataagggccgggactttgccaccgtgcggaaagtgctgtctatgccccaagtgaatatcgtgaaaaagaccgaggtgcagacaggcggcttcagcaaagagtctatcctgcccaagaggaacagcgacaagctgatcgccagaaagaaggactgggaccctaagaagtacggcggcttcgacagccccaccgtggcctattctgtgctggtggtggccaaagtggaaaagggcaagtccaagaaactgaagagtgtgaaagagctgctggggatcaccatcatggaaagaagcagcttcgagaagaatcccatcgactttctggaagccaagggctacaaagaagtgaaaaaggacctgatcatcaagctgcctaagtactccctgttcgagctggaaaacggccggaagagaatgctggcctctgccggcgaactgcagaagggaaacgaactggccctgccctccaaatatgtgaacttcctgtacctggccagccactatgagaagctgaagggctcccccgaggataatgagcagaaacagctgtttgtggaacagcacaaacactacctggacgagatcatcgagcagatcagcgagttctccaagagagtgatcctggccgacgctaatctggacaaggtgctgagcgcctacaacaagcacagagacaagcctatcagagagcaggccgagaatatcatccacctgtttaccctgaccaatctgggagcccctgccgccttcaagtactttgacaccaccatcgaccggaagaggtacaccagcaccaaagaggtgctggacgccaccctgatccaccagagcatcaccggcctgtacgagacacggatcgacctgtctcagctgggaggcgacgcctatccctatgacgtgcccgattatgccagcctgggcagcggctcccccaagaaaaaacgcaaggtggaagatcctaagaaaaagcggaaagtggacggcagcggcagcgagacccccggtaccagcgagagcgccacccccgagagccggacactggtgaccttcaaggatgtatttgtggacttcaccagggaggagtggaagctgctggacactgctcagcagatcgtgtacagaaatgtgatgctggagaactataagaacctggtttccttgggttatcagcttactaagccagatgtgatcctccggttggagaagggagaagagccctgagatcccaagcacgcagcaatgcagctcaaaacgcttagcctagccacacccccacgggaaacagcagtgattaacctttagcaataaacgaaagtttaactaagctatactaaccccagggttggtcaatttcgtgccagccacaccctggtactgcatgcacgcaatgctagctgcccctttcccgtcctgggcaccccgagtctcccccgaccccgggtcccaggtatgctcccacctccacctgccccactcaccacctctgctagttccagacacctccgagacgaggaaaaaaaaaaaaaaaaaaaaaaaaaaaaaaaaaaaaaaaaaaaaaaaaaaaaaaaaaaaaaaaaaaaaaaaaaaaaaaaaaaaaaaaaaaaaaaaaaaaaaaaaaaaaaaaaaaaaaaaaaaaaaaaaaaaaaaaaaaaaaaaaaaaaaaaaaaaaaaaaaaaaaaaaaaaaaaaaaaaaaaaaaaaaaaaaaaaaaaaaccgtcttcaagctttctagaaattcactggccgtcgttttacaacgtcgtgactgggaaaaccctggcgttacccaacttaatcgccttgcagcacatccccctttcgccagctggcgtaatagcgaagaggcccgcaccgatcgcccttcccaacagttgcgcagcctgaatggcgaatggcgcctgatgcggtattttctccttacgcatctgtgcggtatttcacaccgcatatggtgcactctcagtacaatctgctctgatgccgcatagttaagccagccccgacacccgccaacacccgctgacgcgccctgacgggcttgtctgctcccggcatccgcttacagacaagctgtgaccgtctccgggagctgcatgtgtcagaggttttcaccgtcatcaccgaaacgcgcgagacgaaagggcctcgtgatacgcctatttttataggttaatgtcatgataataatggtttcttagacgtcaggtggcacttttcggggaaatgtgcgcggaacccctatttgtttatttttctaaatacattcaaatatgtatccgctcatgagacaataaccctgataaatgcttcaataatattgaaaaaggaagagtatgagtattcaacatttccgtgtcgcccttattcccttttttgcggcattttgccttcctgtttttgctcacccagaaacgctggtgaaagtaaaagatgctgaagatcagttgggtgcacgagtgggttacatcgaactggatctcaacagcggtaagatccttgagagttttcgccccgaagaacgttttccaatgatgagcacttttaaagttctgctatgtggcgcggtattatcccgtattgacgccgggcaagagcaactcggtcgccgcatacactattctcagaatgacttggttgagtactcaccagtcacagaaaagcatcttacggatggcatgacagtaagagaattatgcagtgctgccataaccatgagtgataacactgcggccaacttacttctgacaacgatcggaggaccgaaggagctaaccgcttttttgcacaacatgggggatcatgtaactcgccttgatcgttgggaaccggagctgaatgaagccataccaaacgacgagcgtgacaccacgatgcctgtagcaatggcaacaacgttgcgcaaactattaactggcgaactacttactctagcttcccggcaacaattaatagactggatggaggcggataaagttgcaggaccacttctgcgctcggcccttccggctggctggtttattgctgataaatctggagccggtgagcgtgggtctcgcggtatcattgcagcactggggccagatggtaagccctcccgtatcgtagttatctacacgacggggagtcaggcaactatggatgaacgaaatagacagatcgctgagataggtgcctcactgattaagcattggtaactgtcagaccaagtttactcatatatactttagattgatttaaaacttcatttttaatttaaaaggatctaggtgaagatcctttttgataatctcatgaccaaaatcccttaacgtgagttttcgttccactgagcgtcagaccccgtagaaaagatcaaaggatcttcttgagatcctttttttctgcgcgtaatctgctgcttgcaaacaaaaaaaccaccgctaccagcggtggtttgtttgccggatcaagagctaccaactctttttccgaaggtaactggcttcagcagagcgcagataccaaatactgttcttctagtgtagccgtagttaggccaccacttcaagaactctgtagcaccgcctacatacctcgctctgctaatcctgttaccagtggctgctgccagtggcgataagtcgtgtcttaccgggttggactcaagacgatagttaccggataaggcgcagcggtcgggctgaacggggggttcgtgcacacagcccagcttggagcgaacgacctacaccgaact

SEQ ID NO: 137 - DNA, 9915 bp, synthetic construct
  misc_feature 1..9915: note = V19 DNA
  source 1..9915: mol_type = other DNA
tcagaccaagtttactcatatatactttagattgatttaaaacttcatttttaatttaaaaggatctaggtgaagatcctttttgataatctcatgaccaaaatcccttaacgtgagttttcgttccactgagcgtcagaccccgtagaaaagatcaaaggatcttcttgagatcctttttttctgcgcgtaatctgctgcttgcaaacaaaaaaaccaccgctaccagcggtggtttgtttgccggatcaagagctaccaactctttttccgaaggtaactggcttcagcagagcgcagataccaaatactgttcttctagtgtagccgtagttaggccaccacttcaagaactctgtagcaccgcctacatacctcgctctgctaatcctgttaccagtggctgctgccagtggcgataagtcgtgtcttaccgggttggactcaagacgatagttaccggataaggcgcagcggtcgggctgaacggggggttcgtgcacacagcccagcttggagcgaacgacctacaccgaactgagatacctacagcgtgagctatgagaaagcgccacgcttcccgaagggagaaaggcggacaggtatccggtaagcggcagggtcggaacaggagagcgcacgagggagcttccagggggaaacgcctggtatctttatagtcctgtcgggtttcgccacctctgacttgagcgtcgatttttgtgatgctcgtcaggggggcggagcctatggaaaaacgccagcaacgcggcctttttacggttcctggccttttgctggccttttgctcacatgttctttcctgcgttatcccctgattctgtggataaccgtattaccgcctttgagtgagctgataccgctcgccgcagccgaacgaccgagcgcagcgagtcagtgagcgaggaagcggaagagcgcccaatacgcaaaccgcctctccccgcgcgttggccgattcattaatgcagctggcacgacaggtttcccgactggaaagcgggcagtgagcgcaacgcaattaatgtgagttagctcactcattaggcaccccaggctttacactttatgcttccggctcgtatgttgtgtggaattgtgagcggataacaatttcacacaggaaacagctatgaccatgattacgcctctagaaagctttaatacgactcactataaggactcactatttgttttcgcgcccagttgcaaaaagtgtcgacatttgcttctgacacaactgtgttcactagcaacctcaaacagacaccgccaccatgcctgctgctaagagagtgaaactggatggatccaaccatgaccaggaatttgaccccccaaaggtttacccacctgtgccagctgagaagaggaagcccatccgcgtgctgtctctctttgatgggattgctacagggctcctggtgctgaaggacctgggcatccaagtggaccgctacattgcctccgaggtgtgtgaggactccatcacggtgggcatggtgcggcaccagggaaagatcatgtacgtcggggacgtccgcagcgtcacacagaagcatatccaggagtggggcccattcgacctggtgattggaggcagtccctgcaatgacctctccattgtcaaccctgcccgcaagggactttatgagggtactggccgcctcttctttgagttctaccgcctcctgcatgatgcgcggcccaaggagggagatgatcgccccttcttctggctctttgagaatgtggtggccatgggcgttagtgacaagagggacatctcgcgatttcttgagtctaaccccgtgatgattgacgccaaagaagtgtctgctgcacacagggcccgttacttctggggtaaccttcctggcatgaacaggcctttggcatccactgtgaatgataagctggagctgcaagagtgtctggagcacggcagaatagccaagttcagcaaagtgaggaccattaccaccaggtcaaactctataaagcagggcaaagaccagcatttccccgtgttcatgaacgagaaggaggacatcctgtggtgcactgaaatggaaagggtgtttggcttccccgtccactacacagacgtctccaacatgagccgcttggcgaggcagagactgctgggccgatcgtggagcgtgccggtcatccgccacctcttcgctccgctgaaggaatattttgcttgtgtgtctagcggcaatagtaacgctaacagccgcgggccgagcttcagcagcggcctggtgccgttaagcttgcgcggcagccatatgggccctatggagatatacaagacagtgtctgcatggaagagacagccagtgcgggtactgagcctcttcagaaacatcgacaaggtactaaagagtttgggcttcttggaaagcggttctggttctgggggaggaacgctgaagtacgtggaagatgtcacaaatgtcgtgaggagagacgtggagaaatggggcccctttgacctggtgtacggctcgacgcagcccctaggcagctcttgtgatcgctgtcccggctggtacatgttccagttccaccggatcctgcagtatgcgctgcctcgccaggagagtcagcggcccttcttctggatattcatggacaatctgctgctgactgaggatgaccaagagacaactacccgcttccttcagacagaggctgtgaccctccaggatgtccgtggcagagactaccagaatgctatgcgggtgtggagcaacattccagggctgaagagcaagcatgcgcccctgaccccaaaggaagaagagtatctgcaagcccaagtcagaagcaggagcaagctggacgccccgaaagttgacctcctggtgaagaactgccttctcccgctgagagagtacttcaagtatttttctcaaaactcacttcctcttgacggcagcggcagcgagacccccggtaccagcgagagcgccacccccgagagccggacactggtgaccttcaaggatgtatttgtggacttcaccagggaggagtggaagctgctggacactgctcagcagatcgtgtacagaaatgtgatgctggagaactataagaacctggtttccttgggttatcagcttactaagccagatgtgatcctccggttggagaagggagaagagcccggagggccgagctctggcgcacccccaccaagtggagggtctcctgccgggtccccaacatctactgaagaaggcaccagcgaatccgcaacgcccgagtcaggccctggtacctccacagaaccatctgaaggtagtgcgcctggttccccagctggaagccctacttccaccgaagaaggcacgtcaaccgaaccaagtgaaggatctgcccctgggaccagcactgaaccatctgagccaaaaaagaagagaaaggtaatggacaagaagtacagcatcggcctggccatcggcaccaactctgtgggctgggccgtgatcaccgacgagtacaaggtgcccagcaagaaattcaaggtgctgggcaacaccgaccggcacagcatcaagaagaacctgatcggcgccctgctgttcgacagcggagaaacagccgaggccacccggctgaagagaaccgccagaagaagatacaccagacggaagaaccggatctgctatctgcaagagatcttcagcaacgagatggccaaggtggacgacagcttcttccacagactggaagagtccttcctggtggaagaggataagaagcacgagcggcaccccatcttcggcaacatcgtggacgaggtggcctaccacgagaagtaccccaccatctaccacctgagaaagaaactggtggacagcaccgacaaggccgacctgcggctgatctatctggccctggcccacatgatcaagttccggggccacttcctgatcgagggcgacctgaaccccgacaacagcgacgtggacaagctgttcatccagctggtgcagacctacaaccagctgttcgaggaaaaccccatcaacgccagcggcgtggacgccaaggccatcctgtctgccagactgagcaagagcagacggctggaaaatctgatcgcccagctgcccggcgagaagaagaatggcctgttcggcaacctgattgccctgagcctgggcctgacccccaacttcaagagcaacttcgacctggccgaggatgccaaactgcagctgagcaaggacacctacgacgacgacctggacaacctgctggcccagatcggcgaccagtacgccgacctgtttctggccgccaagaacctgtccgacgccatcctgctgagcgacatcctgagagtgaacaccgagatcaccaaggcccccctgagcgcctctatgatcaagagatacgacgagcaccaccaggacctgaccctgctgaaagctctcgtgcggcagcagctgcctgagaagtacaaagagattttcttcgaccagagcaagaacggctacgccggctacatcgatggcggagccagccaggaagagttctacaagttcatcaagcccatcctggaaaagatggacggcaccgaggaactgctcgtgaagctgaacagagaggacctgctgcggaagcagcggaccttcgacaacggcagcatcccccaccagatccacctgggagagctgcacgccattctgcggcggcaggaagatttttacccattcctgaaggacaaccgggaaaagatcgagaagatcctgaccttccgcatcccctactacgtgggccctctggccaggggaaacagcagattcgcctggatgaccagaaagagcgaggaaaccatcaccccctggaacttcgaggaagtggtggacaagggcgccagcgcccagagcttcatcgagcggatgaccaacttcgataagaacctgcccaacgagaaggtgctgcccaagcacagcctgctgtacgagtacttcaccgtgtacaacgagctgaccaaagtgaaatacgtgaccgagggaatgagaaagcccgccttcctgagcggcgagcagaaaaaagccatcgtggacctgctgttcaagaccaaccggaaagtgaccgtgaagcagctgaaagaggactacttcaagaaaatcgagtgcttcgactccgtggaaatctccggcgtggaagatcggttcaacgcctccctgggcacataccacgatctgctgaaaattatcaaggacaaggacttcctggacaatgaggaaaacgaggacattctggaagatatcgtgctgaccctgacactgtttgaggacagagagatgatcgaggaacggctgaaaacctatgcccacctgttcgacgacaaagtgatgaagcagctgaagcggcggagatacaccggctggggcaggctgagccggaagctgatcaacggcatccgggacaagcagtccggcaagacaatcctggatttcctgaagtccgacggcttcgccaacagaaacttcatgcagctgatccacgacgacagcctgacctttaaagaggacatccagaaagcccaggtgtccggccagggcgatagcctgcacgagcacattgccaatctggccggcagccccgccattaagaagggcatcctgcagacagtgaaggtggtggacgagctcgtgaaagtgatgggccggcacaagcccgagaacatcgtgatcgaaatggccagagagaaccagaccacccagaagggacagaagaacagccgcgagagaatgaagcggatcgaagagggcatcaaagagctgggcagccagatcctgaaagaacaccccgtggaaaacacccagctgcagaacgagaagctgtacctgtactacctgcagaatgggcgggatatgtacgtggaccaggaactggacatcaaccggctgtccgactacgatgtggacgctatcgtgcctcagagctttctgaaggacgactccatcgataacaaagtgctgactcggagcgacaagaaccggggcaagagcgacaacgtgccctccgaagaggtcgtgaagaagatgaagaactactggcgccagctgctgaatgccaagctgattacccagaggaagttcgacaatctgaccaaggccgagagaggcggcctgagcgaactggataaggccggcttcatcaagagacagctggtggaaacccggcagatcacaaagcacgtggcacagatcctggactcccggatgaacactaagtacgacgagaacgacaaactgatccgggaagtgaaagtgatcaccctgaagtccaagctggtgtccgatttccggaaggatttccagttttacaaagtgcgcgagatcaacaactaccaccacgcccacgacgcctacctgaacgccgtcgtgggaaccgccctgatcaaaaagtaccctaagctggaaagcgagttcgtgtacggcgactacaaggtgtacgacgtgcggaagatgatcgccaagagcgagcaggaaatcggcaaggctaccgccaagtacttcttctacagcaacatcatgaactttttcaagaccgagattaccctggccaacggcgagatccggaagcggcctctgatcgagacaaacggcgaaacaggcgagatcgtgtgggataagggccgggactttgccaccgtgcggaaagtgctgtctatgccccaagtgaatatcgtgaaaaagaccgaggtgcagacaggcggcttcagcaaagagtctatcctgcccaagaggaacagcgacaagctgatcgccagaaagaaggactgggaccctaagaagtacggcggcttcgacagccccaccgtggcctattctgtgctggtggtggccaaagtggaaaagggcaagtccaagaaactgaagagtgtgaaagagctgctggggatcaccatcatggaaagaagcagcttcgagaagaatcccatcgactttctggaagccaagggctacaaagaagtgaaaaaggacctgatcatcaagctgcctaagtactccctgttcgagctggaaaacggccggaagagaatgctggcctctgccggcgaactgcagaagggaaacgaactggccctgccctccaaatatgtgaacttcctgtacctggccagccactatgagaagctgaagggctcccccgaggataatgagcagaaacagctgtttgtggaacagcacaaacactacctggacgagatcatcgagcagatcagcgagttctccaagagagtgatcctggccgacgctaatctggacaaggtgctgagcgcctacaacaagcacagagacaagcctatcagagagcaggccgagaatatcatccacctgtttaccctgaccaatctgggagcccctgccgccttcaagtactttgacaccaccatcgaccggaagaggtacaccagcaccaaagaggtgctggacgccaccctgatccaccagagcatcaccggcctgtacgagacacggatcgacctgtctcagctgggaggcgacgcctatccctatgacgtgcccgattatgccagcctgggcagcggctcccccaagaaaaaacgcaaggtggaagatcctaagaaaaagcggaaagtggacggcctcgaggctactaacttcagcctgctgaagcaggctggagacgtggaggagaaccctggacctatgcattaatgagatcccaagcacgcagcaatgcagctcaaaacgcttagcctagccacacccccacgggaaacagcagtgattaacctttagcaataaacgaaagtttaactaagctatactaaccccagggttggtcaatttcgtgccagccacaccctggtactgcatgcacgcaatgctagctgcccctttcccgtcctgggcaccccgagtctcccccgaccccgggtcccaggtatgctcccacctccacctgccccactcaccacctctgctagttccagacacctccgagacgaggaaaaaaaaaaaaaaaaaaaaaaaaaaaaaaaaaaaaaaaaaaaaaaaaaaaaaaaaaaaaaaaaaaaaaaaaaaaaaaaaaaaaaaaaaaaaaaaaaaaaaaaaaaaaaaaaaaaaaaaaaaaaaaaaaaaaaaaaaaaaaaaaaaaaaaaaaaaaaaaaaaaaaaaaaaaaaaaaaaaaaaaaaaaaaaaaaaaaaaaaaaaaaaaaaaaaaaaaaaaaaaaaaaaaaaaaaaaaaaaaaaaaaaaaaaaaaaaaaaaaaaaaaaaaaaaaaaaaaaaaaaaaaaaaaaaaaaaaaaaaaaaaaaaaaaaaaaaaaaaaaaaaaaaaaaaaaaaaaaaaaaaaaaaaaaaaaaaaaaaaaaaaaaaaaaaaaaaaaaaaaaaaaaaaaaaaaaccgtcttcaagctttctagaaattcactggccgtcgttttacaacgtcgtgactgggaaaaccctggcgttacccaacttaatcgccttgcagcacatccccctttcgccagctggcgtaatagcgaagaggcccgcaccgatcgcccttcccaacagttgcgcagcctgaatggcgaatggcgcctgatgcggtattttctccttacgcatctgtgcggtatttcacaccgcatatggtgcactctcagtacaatctgctctgatgccgcatagttaagccagccccgacacccgccaacacccgctgacgcgccctgacgggcttgtctgctcccggcatccgcttacagacaagctgtgaccgtctccgggagctgcatgtgtcagaggttttcaccgtcatcaccgaaacgcgcgagacgaaagggcctcgtgatacgcctatttttataggttaatgtcatgataataatggtttcttagacgtcaggtggcacttttcggggaaatgtgcgcggaacccctatttgtttatttttctaaatacattcaaatatgtatccgctcatgagacaataaccctgataaatgcttcaataatattgaaaaaggaagagtatgagtattcaacatttccgtgtcgcccttattcccttttttgcggcattttgccttcctgtttttgctcacccagaaacgctggtgaaagtaaaagatgctgaagatcagttgggtgcacgagtgggttacatcgaactggatctcaacagcggtaagatccttgagagttttcgccccgaagaacgttttccaatgatgagcacttttaaagttctgctatgtggcgcggtattatcccgtattgacgccgggcaagagcaactcggtcgccgcatacactattctcagaatgacttggttgagtactcaccagtcacagaaaagcatcttacggatggcatgacagtaagagaattatgcagtgctgccataaccatgagtgataacactgcggccaacttacttctgacaacgatcggaggaccgaaggagctaaccgcttttttgcacaacatgggggatcatgtaactcgccttgatcgttgggaaccggagctgaatgaagccataccaaacgacgagcgtgacaccacgatgcctgtagcaatggcaacaacgttgcgcaaactattaactggcgaactacttactctagcttcccggcaacaattaatagactggatggaggcggataaagttgcaggaccacttctgcgctcggcccttccggctggctggtttattgctgataaatctggagccggtgagcgtgggtctcgcggtatcattgcagcactggggccagatggtaagccctcccgtatcgtagttatctacacgacggggagtcaggcaactatggatgaacgaaatagacagatcgctgagataggtgcctcactgattaagcattggtaactg

SEQ ID NO: 138 - DNA, 9983 bp, synthetic construct
  misc_feature 1..9983: note = V20 DNA
  source 1..9983: mol_type = other DNA
attaatctagaaccggtccagccaccatgaaccatgaccaggaatttgaccccccaaaggtttacccacctgtgccagctgagaagaggaagcccatccgcgtgctgtctctctttgatgggattgctacagggctcctggtgctgaaggacctgggcatccaagtggaccgctacattgcctccgaggtgtgtgaggactccatcacggtgggcatggtgcggcaccagggaaagatcatgtacgtcggggacgtccgcagcgtcacacagaagcatatccaggagtggggcccattcgacctggtgattggaggcagtccctgcaatgacctctccattgtcaaccctgcccgcaagggactttatgagggtactggccgcctcttctttgagttctaccgcctcctgcatgatgcgcggcccaaggagggagatgatcgccccttcttctggctctttgagaatgtggtggccatgggcgttagtgacaagagggacatctcgcgatttcttgagtctaaccccgtgatgattgacgccaaagaagtgtctgctgcacacagggcccgttacttctggggtaaccttcctggcatgaacaggcctttggcatccactgtgaatgataagctggagctgcaagagtgtctggagcacggcagaatagccaagttcagcaaagtgaggaccattaccaccaggtcaaactctataaagcagggcaaagaccagcatttccccgtcttcatgaacgagaaggaggacatcctgtggtgcactgaaatggaaagggtgtttggcttccccgtccactacacagacgtctccaacatgagccgcttggcgaggcagagactgctgggccgatcgtggagcgtgccggtcatccgccacctcttcgctccgctgaaggaatattttgcttgtgtgtctagcggcaatagtaacgctaacagccgcgggccgagcttcagcagcggcctggtgccgttaagcttgcgcggcagccatatgttcgaaaccgtgcctgtgtggaggagacagccagtccgggtgctgtccctttttgaagacatcaagaaagagctgacgagtttgggctttttggaaagtggttctgacccgggacaactgaagcatgtggttgatgtcacagacacagtgaggaaggatgtggaggagtggggacccttcgatcttgtgtacggcgccacacctcccctgggccacacctgtgaccgtcctcccagctggtacctgttccagttccaccggctcctgcagtacgcacggcccaagccaggcagccccaggcccttcttctggatgttcgtggacaatctggtgctgaacaaggaagacctggacgtcgcatctcgcttcctggagatggagccagtcaccatcccagatgtccacggcggatccttgcagaatgctgtccgcgtgtggagcaacatcccagccataaggagcagcaggcactgggctctggtttcggaagaagaattgtccctgctggcccagaacaagcagagctcgaagctcgcggccaagtggcccaccaagctggtgaagaactgctttctccccctaagagaatatttcaagtatttttcagacggcagcggcagcgagacccccggtaccagcgagagcgccacccccgagagcatgaacaattcccagggaagagtgaccttcgaggatgtcactgtgaacttcacccagggggagtggcagcggctgaatcccgaacagagaaacttgtacagggatgtgatgctggagaattacagcaaccttgtctctgtgggacaaggggaaaccaccaaacccgatgtgatcttgaggttggaacaaggaaaggagccatggttggaggaagaggaagtgctgggaagtggccgtgcagaaaaaaatggggacattggagggcagatttggaagccaaaggatgtgaaagagagtctcggagggccgagctctggcgcacccccaccaagtggagggtctcctgccgggtccccaacatctactgaagaaggcaccagcgaatccgcaacgcccgagtcaggccctggtacctccacagaaccatctgaaggtagtgcgcctggttccccagctggaagccctacttccaccgaagaaggcacgtcaaccgaaccaagtgaaggatctgcccctgggaccagcactgaaccatctgagccaaaaaagaagagaaaggtaatggacaagaagtacagcatcggcctggccatcggcaccaactctgtgggctgggccgtgatcaccgacgagtacaaggtgcccagcaagaaattcaaggtgctgggcaacaccgaccggcacagcatcaagaagaacctgatcggcgccctgctgttcgacagcggagaaacagccgaggccacccggctgaagagaaccgccagaagaagatacaccagacggaagaaccggatctgctatctgcaagagatcttcagcaacgagatggccaaggtggacgacagcttcttccacagactggaagagtccttcctggtggaagaggataagaagcacgagcggcaccccatcttcggcaacatcgtggacgaggtggcctaccacgagaagtaccccaccatctaccacctgagaaagaaactggtggacagcaccgacaaggccgacctgcggctgatctatctggccctggcccacatgatcaagttccggggccacttcctgatcgagggcgacctgaaccccgacaacagcgacgtggacaagctgttcatccagctggtgcagacctacaaccagctgttcgaggaaaaccccatcaacgccagcggcgtggacgccaaggccatcctgtctgccagactgagcaagagcagacggctggaaaatctgatcgcccagctgcccggcgagaagaagaatggcctgttcggcaacctgattgccctgagcctgggcctgacccccaacttcaagagcaacttcgacctggccgaggatgccaaactgcagctgagcaaggacacctacgacgacgacctggacaacctgctggcccagatcggcgaccagtacgccgacctgtttctggccgccaagaacctgtccgacgccatcctgctgagcgacatcctgagagtgaacaccgagatcaccaaggcccccctgagcgcctctatgatcaagagatacgacgagcaccaccaggacctgaccctgctgaaagctctcgtgcggcagcagctgcctgagaagtacaaagagattttcttcgaccagagcaagaacggctacgccggctacatcgatggcggagccagccaggaagagttctacaagttcatcaagcccatcctggaaaagatggacggcaccgaggaactgctcgtgaagctgaacagagaggacctgctgcggaagcagcggaccttcgacaacggcagcatcccccaccagatccacctgggagagctgcacgccattctgcggcggcaggaagatttttacccattcctgaaggacaaccgggaaaagatcgagaagatcctgaccttccgcatcccctactacgtgggccctctggccaggggaaacagcagattcgcctggatgaccagaaagagcgaggaaaccatcaccccctggaacttcgaggaagtggtggacaagggcgccagcgcccagagcttcatcgagcggatgaccaacttcgataagaacctgcccaacgagaaggtgctgcccaagcacagcctgctgtacgagtacttcaccgtgtacaacgagctgaccaaagtgaaatacgtgaccgagggaatgagaaagcccgccttcctgagcggcgagcagaaaaaagccatcgtggacctgctgttcaagaccaaccggaaagtgaccgtgaagcagctgaaagaggactacttcaagaaaatcgagtgcttcgactccgtggaaatctccggcgtggaagatcggttcaacgcctccctgggcacataccacgatctgctgaaaattatcaaggacaaggacttcctggacaatgaggaaaacgaggacattctggaagatatcgtgctgaccctgacactgtttgaggacagagagatgatcgaggaacggctgaaaacctatgcccacctgttcgacgacaaagtgatgaagcagctgaagcggcggagatacaccggctggggcaggctgagccggaagctgatcaacggcatccgggacaagcagtccggcaagacaatcctggatttcctgaagtccgacggcttcgccaacagaaacttcatgcagctgatccacgacgacagcctgacctttaaagaggacatccagaaagcccaggtgtccggccagggcgatagcctgcacgagcacattgccaatctggccggcagccccgccattaagaagggcatcctgcagacagtgaaggtggtggacgagctcgtgaaagtgatgggccggcacaagcccgagaacatcgtgatcgaaatggccagagagaaccagaccacccagaagggacagaagaacagccgcgagagaatgaagcggatcgaagagggcatcaaagagctgggcagccagatcctgaaagaacaccccgtggaaaacacccagctgcagaacgagaagctgtacctgtactacctgcagaatgggcgggatatgtacgtggaccaggaactggacatcaaccggctgtccgactacgatgtggacgctatcgtgcctcagagctttctgaaggacgactccatcgataacaaagtgctgactcggagcgacaagaaccggggcaagagcgacaacgtgccctccgaagaggtcgtgaagaagatgaagaactactggcgccagctgctgaatgccaagctgattacccagaggaagttcgacaatctgaccaaggccgagagaggcggcctgagcgaactggataaggccggcttcatcaagagacagctggtggaaacccggcagatcacaaagcacgtggcacagatcctggactcccggatgaacactaagtacgacgagaacgacaaactgatccgggaagtgaaagtgatcaccctgaagtccaagctggtgtccgatttccggaaggatttccagttttacaaagtgcgcgagatcaacaactaccaccacgcccacgacgcctacctgaacgccgtcgtgggaaccgccctgatcaaaaagtaccctaagctggaaagcgagttcgtgtacggcgactacaaggtgtacgacgtgcggaagatgatcgccaagagcgagcaggaaatcggcaaggctaccgccaagtacttcttctacagcaacatcatgaactttttcaagaccgagattaccctggccaacggcgagatccggaagcggcctctgatcgagacaaacggcgaaacaggcgagatcgtgtgggataagggccgggactttgccaccgtgcggaaagtgctgtctatgccccaagtgaatatcgtgaaaaagaccgaggtgcagacaggcggcttcagcaaagagtctatcctgcccaagaggaacagcgacaagctgatcgccagaaagaaggactgggaccctaagaagtacggcggcttcgacagccccaccgtggcctattctgtgctggtggtggccaaagtggaaaagggcaagtccaagaaactgaagagtgtgaaagagctgctggggatcaccatcatggaaagaagcagcttcgagaagaatcccatcgactttctggaagccaagggctacaaagaagtgaaaaaggacctgatcatcaagctgcctaagtactccctgttcgagctggaaaacggccggaagagaatgctggcctctgccggcgaactgcagaagggaaacgaactggccctgccctccaaatatgtgaacttcctgtacctggccagccactatgagaagctgaagggctcccccgaggataatgagcagaaacagctgtttgtggaacagcacaaacactacctggacgagatcatcgagcagatcagcgagttctccaagagagtgatcctggccgacgctaatctggacaaggtgctgagcgcctacaacaagcacagagacaagcctatcagagagcaggccgagaatatcatccacctgtttaccctgaccaatctgggagcccctgccgccttcaagtactttgacaccaccatcgaccggaagaggtacaccagcaccaaagaggtgctggacgccaccctgatccaccagagcatcaccggcctgtacgagacacggatcgacctgtctcagctgggaggcgacgcctatccctatgacgtgcccgattatgccagcctgggcagcggctcccccaagaaaaaacgcaaggtggaagatcctaagaaaaagcggaaagtggacggcctcgaggctactaacttcagcctgctgaagcaggctggagacgtggaggagaaccctggacctatgcattaatgagatcccaagcacgcagcaatgcagctcaaaacgcttagcctagccacacccccacgggaaacagcagtgattaacctttagcaataaacgaaagtttaactaagctatactaaccccagggttggtcaatttcgtgccagccacaccctggtactgcatgcacgcaatgctagctgcccctttcccgtcctgggcaccccgagtctcccccgaccccgggtcccaggtatgctcccacctccacctgccccactcaccacctctgctagttccagacacctccgagacgaggaaaaaaaaaaaaaaaaaaaaaaaaaaaaaaaaaaaaaaaaaaaaaaaaaaaaaaaaaaaaaaaaaaaaaaaaaaaaaaaaaaaaaaaaaaaaaaaaaaaaaaaaaaaaaaaaaaaaaaaaaaaaaaaaaaaaaaaaaaaaaaaaaaaaaaaaaaaaaaaaaaaaaaaaaaaaaaaaaaaaaaaaaaaaaaaaaaaaaaaaaaaaaaaaaaaaaaaaaaaaaaaaaaaaaaaaaaaaaaaaaaaaaaaaaaaaaaaaaaaaaaaaaaaaaaaaaaaaaaaaaaaaaaaaaaaaaaaaaaaaaaaaaaaaaaaaaaaaaaaaaaaaaaaaaaaaaaaaaaaaaaaaaaaaaaaaaaaaaaaaaaaaaaaaaaaaaaaaaaaaaaaaaaaaaaaaaaccgtcttcaagctttctagaaattcactggccgtcgttttacaacgtcgtgactgggaaaaccctggcgttacccaacttaatcgccttgcagcacatccccctttcgccagctggcgtaatagcgaagaggcccgcaccgatcgcccttcccaacagttgcgcagcctgaatggcgaatggcgcctgatgcggtattttctccttacgcatctgtgcggtatttcacaccgcatatggtgcactctcagtacaatctgctctgatgccgcatagttaagccagccccgacacccgccaacacccgctgacgcgccctgacgggcttgtctgctcccggcatccgcttacagacaagctgtgaccgtctccgggagctgcatgtgtcagaggttttcaccgtcatcaccgaaacgcgcgagacgaaagggcctcgtgatacgcctatttttataggttaatgtcatgataataatggtttcttagacgtcaggtggcacttttcggggaaatgtgcgcggaacccctatttgtttatttttctaaatacattcaaatatgtatccgctcatgagacaataaccctgataaatgcttcaataatattgaaaaaggaagagtatgagtattcaacatttccgtgtcgcccttattcccttttttgcggcattttgccttcctgtttttgctcacccagaaacgctggtgaaagtaaaagatgctgaagatcagttgggtgcacgagtgggttacatcgaactggatctcaacagcggtaagatccttgagagttttcgccccgaagaacgttttccaatgatgagcacttttaaagttctgctatgtggcgcggtattatcccgtattgacgccgggcaagagcaactcggtcgccgcatacactattctcagaatgacttggttgagtactcaccagtcacagaaaagcatcttacggatggcatgacagtaagagaattatgcagtgctgccataaccatgagtgataacactgcggccaacttacttctgacaacgatcggaggaccgaaggagctaaccgcttttttgcacaacatgggggatcatgtaactcgccttgatcgttgggaaccggagctgaatgaagccataccaaacgacgagcgtgacaccacgatgcctgtagcaatggcaacaacgttgcgcaaactattaactggcgaactacttactctagcttcccggcaacaattaatagactggatggaggcggataaagttgcaggaccacttctgcgctcggcccttccggctggctggtttattgctgataaatctggagccggtgagcgtgggtctcgcggtatcattgcagcactggggccagatggtaagccctcccgtatcgtagttatctacacgacggggagtcaggcaactatggatgaacgaaatagacagatcgctgagataggtgcctcactgattaagcattggtaactgtcagaccaagtttactcatatatactttagattgatttaaaacttcatttttaatttaaaaggatctaggtgaagatcctttttgataatctcatgaccaaaatcccttaacgtgagttttcgttccactgagcgtcagaccccgtagaaaagatcaaaggatcttcttgagatcctttttttctgcgcgtaatctgctgcttgcaaacaaaaaaaccaccgctaccagcggtggtttgtttgccggatcaagagctaccaactctttttccgaaggtaactggcttcagcagagcgcagataccaaatactgttcttctagtgtagccgtagttaggccaccacttcaagaactctgtagcaccgcctacatacctcgctctgctaatcctgttaccagtggctgctgccagtggcgataagtcgtgtcttaccgggttggactcaagacgatagttaccggataaggcgcagcggtcgggctgaacggggggttcgtgcacacagcccagcttggagcgaacgacctacaccgaactgagatacctacagcgtgagctatgagaaagcgccacgcttcccgaagggagaaaggcggacaggtatccggtaagcggcagggtcggaacaggagagcgcacgagggagcttccagggggaaacgcctggtatctttatagtcctgtcgggtttcgccacctctgacttgagcgtcgatttttgtgatgctcgtcaggggggcggagcctatggaaaaacgccagcaacgcggcctttttacggttcctggccttttgctggccttttgctcacatgttctttcctgcgttatcccctgattctgtggataaccgtattaccgcctttgagtgagctgataccgctcgccgcagccgaacgaccgagcgcagcgagtcagtgagcgaggaagcggaagagcgcccaatacgcaaaccgcctctccccgcgcgttggccgattcattaatgcagctggcacgacaggtttcccgactggaaagcgggcagtgagcgcaacgcaattaatgtgagttagctcactcattaggcaccccaggctttacactttatgcttccggctcgtatgttgtgtggaattgtgagcggataacaatttcacacaggaaacagctatgaccatgattacgcctctagaaagctttaatacgactcactataaggactcactatttgttttcgcgcccagttgcaaaaagtgtcgacatttgcttctgacacaactgtgttcactagcaacctcaaacagacacctta

SEQ ID NO: 139 - DNA, 9962 bp, synthetic construct
  misc_feature 1..9962: note = V21 DNA
  source 1..9962: mol_type = other DNA
ttttttgcacaacatgggggatcatgtaactcgccttgatcgttgggaaccggagctgaatgaagccataccaaacgacgagcgtgacaccacgatgcctgtagcaatggcaacaacgttgcgcaaactattaactggcgaactacttactctagcttcccggcaacaattaatagactggatggaggcggataaagttgcaggaccacttctgcgctcggcccttccggctggctggtttattgctgataaatctggagccggtgagcgtgggtctcgcggtatcattgcagcactggggccagatggtaagccctcccgtatcgtagttatctacacgacggggagtcaggcaactatggatgaacgaaatagacagatcgctgagataggtgcctcactgattaagcattggtaactgtcagaccaagtttactcatatatactttagattgatttaaaacttcatttttaatttaaaaggatctaggtgaagatcctttttgataatctcatgaccaaaatcccttaacgtgagttttcgttccactgagcgtcagaccccgtagaaaagatcaaaggatcttcttgagatcctttttttctgcgcgtaatctgctgcttgcaaacaaaaaaaccaccgctaccagcggtggtttgtttgccggatcaagagctaccaactctttttccgaaggtaactggcttcagcagagcgcagataccaaatactgttcttctagtgtagccgtagttaggccaccacttcaagaactctgtagcaccgcctacatacctcgctctgctaatcctgttaccagtggctgctgccagtggcgataagtcgtgtcttaccgggttggactcaagacgatagttaccggataaggcgcagcggtcgggctgaacggggggttcgtgcacacagcccagcttggagcgaacgacctacaccgaactgagatacctacagcgtgagctatgagaaagcgccacgcttcccgaagggagaaaggcggacaggtatccggtaagcggcagggtcggaacaggagagcgcacgagggagcttccagggggaaacgcctggtatctttatagtcctgtcgggtttcgccacctctgacttgagcgtcgatttttgtgatgctcgtcaggggggcggagcctatggaaaaacgccagcaacgcggcctttttacggttcctggccttttgctggccttttgctcacatgttctttcctgcgttatcccctgattctgtggataaccgtattaccgcctttgagtgagctgataccgctcgccgcagccgaacgaccgagcgcagcgagtcagtgagcgaggaagcggaagagcgcccaatacgcaaaccgcctctccccgcgcgttggccgattcattaatgcagctggcacgacaggtttcccgactggaaagcgggcagtgagcgcaacgcaattaatgtgagttagctcactcattaggcaccccaggctttacactttatgcttccggctcgtatgttgtgtggaattgtgagcggataacaatttcacacaggaaacagctatgaccatgattacgcctctagaaagctttaatacgactcactataaggactcactatttgttttcgcgcccagttgcaaaaagtgtcgacatttgcttctgacacaactgtgttcactagcaacctcaaacagacaccttaattaagccaccatgaacaattcccagggaagagtgaccttcgaggatgtcactgtgaacttcacccagggggagtggcagcggctgaatcccgaacagagaaacttgtacagggatgtgatgctggagaattacagcaaccttgtctctgtgggacaaggggaaaccaccaaacccgatgtgatcttgaggttggaacaaggaaaggagccatggttggaggaagaggaagtgctgggaagtggccgtgcagaaaaaaatggggacattggagggcagatttggaagccaaaggatgtgaaagagagtctcagcggcagcgagacccccggtaccagcgagagcgccacccccgagagcatgaaccatgaccaggaatttgaccccccaaaggtttacccacctgtgccagctgagaagaggaagcccatccgcgtgctgtctctctttgatgggattgctacagggctcctggtgctgaaggacctgggcatccaagtggaccgctacattgcctccgaggtgtgtgaggactccatcacggtgggcatggtgcggcaccagggaaagatcatgtacgtcggggacgtccgcagcgtcacacagaagcatatccaggagtggggcccattcgacctggtgattggaggcagtccctgcaatgacctctccattgtcaaccctgcccgcaagggactttatgagggtactggccgcctcttctttgagttctaccgcctcctgcatgatgcgcggcccaaggagggagatgatcgccccttcttctggctctttgagaatgtggtggccatgggcgttagtgacaagagggacatctcgcgatttcttgagtctaaccccgtgatgattgacgccaaagaagtgtctgctgcacacagggcccgttacttctggggtaaccttcctggcatgaacaggcctttggcatccactgtgaatgataagctggagctgcaagagtgtctggagcacggcagaatagccaagttcagcaaagtgaggaccattaccaccaggtcaaactctataaagcagggcaaagaccagcatttccccgtcttcatgaacgagaaggaggacatcctgtggtgcactgaaatggaaagggtgtttggcttccccgtccactacacagacgtctccaacatgagccgcttggcgaggcagagactgctgggccgatcgtggagcgtgccggtcatccgccacctcttcgctccgctgaaggaatattttgcttgtgtgtctagcggcaatagtaacgctaacagccgcgggccgagcttcagcagcggcctggtgccgttaagcttgcgcggcagccatatgttcgaaaccgtgcctgtgtggaggagacagccagtccgggtgctgtccctttttgaagacatcaagaaagagctgacgagtttgggctttttggaaagtggttctgacccgggacaactgaagcatgtggttgatgtcacagacacagtgaggaaggatgtggaggagtggggacccttcgatcttgtgtacggcgccacacctcccctgggccacacctgtgaccgtcctcccagctggtacctgttccagttccaccggctcctgcagtacgcacggcccaagccaggcagccccaggcccttcttctggatgttcgtggacaatctggtgctgaacaaggaagacctggacgtcgcatctcgcttcctggagatggagccagtcaccatcccagatgtccacggcggatccttgcagaatgctgtccgcgtgtggagcaacatcccagccataaggagcagcaggcactgggctctggtttcggaagaagaattgtccctgctggcccagaacaagcagagctcgaagctcgcggccaagtggcccaccaagctggtgaagaactgctttctccccctaagagaatatttcaagtatttttcaggagggccgagctctggcgcacccccaccaagtggagggtctcctgccgggtccccaacatctactgaagaaggcaccagcgaatccgcaacgcccgagtcaggccctggtacctccacagaaccatctgaaggtagtgcgcctggttccccagctggaagccctacttccaccgaagaaggcacgtcaaccgaaccaagtgaaggatctgcccctgggaccagcactgaaccatctgagccaaaaaagaagagaaaggtaatggacaagaagtacagcatcggcctggccatcggcaccaactctgtgggctgggccgtgatcaccgacgagtacaaggtgcccagcaagaaattcaaggtgctgggcaacaccgaccggcacagcatcaagaagaacctgatcggcgccctgctgttcgacagcggagaaacagccgaggccacccggctgaagagaaccgccagaagaagatacaccagacggaagaaccggatctgctatctgcaagagatcttcagcaacgagatggccaaggtggacgacagcttcttccacagactggaagagtccttcctggtggaagaggataagaagcacgagcggcaccccatcttcggcaacatcgtggacgaggtggcctaccacgagaagtaccccaccatctaccacctgagaaagaaactggtggacagcaccgacaaggccgacctgcggctgatctatctggccctggcccacatgatcaagttccggggccacttcctgatcgagggcgacctgaaccccgacaacagcgacgtggacaagctgttcatccagctggtgcagacctacaaccagctgttcgaggaaaaccccatcaacgccagcggcgtggacgccaaggccatcctgtctgccagactgagcaagagcagacggctggaaaatctgatcgcccagctgcccggcgagaagaagaatggcctgttcggcaacctgattgccctgagcctgggcctgacccccaacttcaagagcaacttcgacctggccgaggatgccaaactgcagctgagcaaggacacctacgacgacgacctggacaacctgctggcccagatcggcgaccagtacgccgacctgtttctggccgccaagaacctgtccgacgccatcctgctgagcgacatcctgagagtgaacaccgagatcaccaaggcccccctgagcgcctctatgatcaagagatacgacgagcaccaccaggacctgaccctgctgaaagctctcgtgcggcagcagctgcctgagaagtacaaagagattttcttcgaccagagcaagaacggctacgccggctacatcgatggcggagccagccaggaagagttctacaagttcatcaagcccatcctggaaaagatggacggcaccgaggaactgctcgtgaagctgaacagagaggacctgctgcggaagcagcggaccttcgacaacggcagcatcccccaccagatccacctgggagagctgcacgccattctgcggcggcaggaagatttttacccattcctgaaggacaaccgggaaaagatcgagaagatcctgaccttccgcatcccctactacgtgggccctctggccaggggaaacagcagattcgcctggatgaccagaaagagcgaggaaaccatcaccccctggaacttcgaggaagtggtggacaagggcgccagcgcccagagcttcatcgagcggatgaccaacttcgataagaacctgcccaacgagaaggtgctgcccaagcacagcctgctgtacgagtacttcaccgtgtacaacgagctgaccaaagtgaaatacgtgaccgagggaatgagaaagcccgccttcctgagcggcgagcagaaaaaagccatcgtggacctgctgttcaagaccaaccggaaagtgaccgtgaagcagctgaaagaggactacttcaagaaaatcgagtgcttcgactccgtggaaatctccggcgtggaagatcggttcaacgcctccctgggcacataccacgatctgctgaaaattatcaaggacaaggacttcctggacaatgaggaaaacgaggacattctggaagatatcgtgctgaccctgacactgtttgaggacagagagatgatcgaggaacggctgaaaacctatgcccacctgttcgacgacaaagtgatgaagcagctgaagcggcggagatacaccggctggggcaggctgagccggaagctgatcaacggcatccgggacaagcagtccggcaagacaatcctggatttcctgaagtccgacggcttcgccaacagaaacttcatgcagctgatccacgacgacagcctgacctttaaagaggacatccagaaagcccaggtgtccggccagggcgatagcctgcacgagcacattgccaatctggccggcagccccgccattaagaagggcatcctgcagacagtgaaggtggtggacgagctcgtgaaagtgatgggccggcacaagcccgagaacatcgtgatcgaaatggccagagagaaccagaccacccagaagggacagaagaacagccgcgagagaatgaagcggatcgaagagggcatcaaagagctgggcagccagatcctgaaagaacaccccgtggaaaacacccagctgcagaacgagaagctgtacctgtactacctgcagaatgggcgggatatgtacgtggaccaggaactggacatcaaccggctgtccgactacgatgtggacgctatcgtgcctcagagctttctgaaggacgactccatcgataacaaagtgctgactcggagcgacaagaaccggggcaagagcgacaacgtgccctccgaagaggtcgtgaagaagatgaagaactactggcgccagctgctgaatgccaagctgattacccagaggaagttcgacaatctgaccaaggccgagagaggcggcctgagcgaactggataaggccggcttcatcaagagacagctggtggaaacccggcagatcacaaagcacgtggcacagatcctggactcccggatgaacactaagtacgacgagaacgacaaactgatccgggaagtgaaagtgatcaccctgaagtccaagctggtgtccgatttccggaaggatttccagttttacaaagtgcgcgagatcaacaactaccaccacgcccacgacgcctacctgaacgccgtcgtgggaaccgccctgatcaaaaagtaccctaagctggaaagcgagttcgtgtacggcgactacaaggtgtacgacgtgcggaagatgatcgccaagagcgagcaggaaatcggcaaggctaccgccaagtacttcttctacagcaacatcatgaactttttcaagaccgagattaccctggccaacggcgagatccggaagcggcctctgatcgagacaaacggcgaaacaggcgagatcgtgtgggataagggccgggactttgccaccgtgcggaaagtgctgtctatgccccaagtgaatatcgtgaaaaagaccgaggtgcagacaggcggcttcagcaaagagtctatcctgcccaagaggaacagcgacaagctgatcgccagaaagaaggactgggaccctaagaagtacggcggcttcgacagccccaccgtggcctattctgtgctggtggtggccaaagtggaaaagggcaagtccaagaaactgaagagtgtgaaagagctgctggggatcaccatcatggaaagaagcagcttcgagaagaatcccatcgactttctggaagccaagggctacaaagaagtgaaaaaggacctgatcatcaagctgcctaagtactccctgttcgagctggaaaacggccggaagagaatgctggcctctgccggcgaactgcagaagggaaacgaactggccctgccctccaaatatgtgaacttcctgtacctggccagccactatgagaagctgaagggctcccccgaggataatgagcagaaacagctgtttgtggaacagcacaaacactacctggacgagatcatcgagcagatcagcgagttctccaagagagtgatcctggccgacgctaatctggacaaggtgctgagcgcctacaacaagcacagagacaagcctatcagagagcaggccgagaatatcatccacctgtttaccctgaccaatctgggagcccctgccgccttcaagtactttgacaccaccatcgaccggaagaggtacaccagcaccaaagaggtgctggacgccaccctgatccaccagagcatcaccggcctgtacgagacacggatcgacctgtctcagctgggaggcgacgcctatccctatgacgtgcccgattatgccagcctgggcagcggctcccccaagaaaaaacgcaaggtggaagatcctaagaaaaagcggaaagtggacggcctcgaggctactaacttcagcctgctgaagcaggctggagacgtggaggagaaccctggacctatgcattaatgagatcccaagcacgcagcaatgcagctcaaaacgcttagcctagccacacccccacgggaaacagcagtgattaacctttagcaataaacgaaagtttaactaagctatactaaccccagggttggtcaatttcgtgccagccacaccctggtactgcatgcacgcaatgctagctgcccctttcccgtcctgggcaccccgagtctcccccgaccccgggtcccaggtatgctcccacctccacctgccccactcaccacctctgctagttccagacacctccgagacgaggaaaaaaaaaaaaaaaaaaaaaaaaaaaaaaaaaaaaaaaaaaaaaaaaaaaaaaaaaaaaaaaaaaaaaaaaaaaaaaaaaaaaaaaaaaaaaaaaaaaaaaaaaaaaaaaaaaaaaaaaaaaaaaaaaaaaaaaaaaaaaaaaaaaaaaaaaaaaaaaaaaaaaaaaaaaaaaaaaaaaaaaaaaaaaaaaaaaaaaaaaaaaaaaaaaaaaaaaaaaaaaaaaaaaaaaaaaaaaaaaaaaaaaaaaaaaaaaaaaaaaaaaaaaaaaaaaaaaaaaaaaaaaaaaaaaaaaaaaaaaaaaaaaaaaaaaaaaaaaaaaaaaaaaaaaaaaaaaaaaaaaaaaaaaaaaaaaaaaaaaaaaaaaaaaaaaaaaaaaaaaaaaaaaaaaaaaaccgtcttcaagctttctagaaattcactggccgtcgttttacaacgtcgtgactgggaaaaccctggcgttacccaacttaatcgccttgcagcacatccccctttcgccagctggcgtaatagcgaagaggcccgcaccgatcgcccttcccaacagttgcgcagcctgaatggcgaatggcgcctgatgcggtattttctccttacgcatctgtgcggtatttcacaccgcatatggtgcactctcagtacaatctgctctgatgccgcatagttaagccagccccgacacccgccaacacccgctgacgcgccctgacgggcttgtctgctcccggcatccgcttacagacaagctgtgaccgtctccgggagctgcatgtgtcagaggttttcaccgtcatcaccgaaacgcgcgagacgaaagggcctcgtgatacgcctatttttataggttaatgtcatgataataatggtttcttagacgtcaggtggcacttttcggggaaatgtgcgcggaacccctatttgtttatttttctaaatacattcaaatatgtatccgctcatgagacaataaccctgataaatgcttcaataatattgaaaaaggaagagtatgagtattcaacatttccgtgtcgcccttattcccttttttgcggcattttgccttcctgtttttgctcacccagaaacgctggtgaaagtaaaagatgctgaagatcagttgggtgcacgagtgggttacatcgaactggatctcaacagcggtaagatccttgagagttttcgccccgaagaacgttttccaatgatgagcacttttaaagttctgctatgtggcgcggtattatcccgtattgacgccgggcaagagcaactcggtcgccgcatacactattctcagaatgacttggttgagtactcaccagtcacagaaaagcatcttacggatggcatgacagtaagagaattatgcagtgctgccataaccatgagtgataacactgcggccaacttacttctgacaacgatcggaggaccgaaggagctaaccgc

SEQ ID NO: 140 - DNA, 9887 bp, synthetic construct
  misc_feature 1..9887: note = V22 DNA
  source 1..9887: mol_type = other DNA
ttttttgcacaacatgggggatcatgtaactcgccttgatcgttgggaaccggagctgaatgaagccataccaaacgacgagcgtgacaccacgatgcctgtagcaatggcaacaacgttgcgcaaactattaactggcgaactacttactctagcttcccggcaacaattaatagactggatggaggcggataaagttgcaggaccacttctgcgctcggcccttccggctggctggtttattgctgataaatctggagccggtgagcgtgggtctcgcggtatcattgcagcactggggccagatggtaagccctcccgtatcgtagttatctacacgacggggagtcaggcaactatggatgaacgaaatagacagatcgctgagataggtgcctcactgattaagcattggtaactgtcagaccaagtttactcatatatactttagattgatttaaaacttcatttttaatttaaaaggatctaggtgaagatcctttttgataatctcatgaccaaaatcccttaacgtgagttttcgttccactgagcgtcagaccccgtagaaaagatcaaaggatcttcttgagatcctttttttctgcgcgtaatctgctgcttgcaaacaaaaaaaccaccgctaccagcggtggtttgtttgccggatcaagagctaccaactctttttccgaaggtaactggcttcagcagagcgcagataccaaatactgttcttctagtgtagccgtagttaggccaccacttcaagaactctgtagcaccgcctacatacctcgctctgctaatcctgttaccagtggctgctgccagtggcgataagtcgtgtcttaccgggttggactcaagacgatagttaccggataaggcgcagcggtcgggctgaacggggggttcgtgcacacagcccagcttggagcgaacgacctacaccgaactgagatacctacagcgtgagctatgagaaagcgccacgcttcccgaagggagaaaggcggacaggtatccggtaagcggcagggtcggaacaggagagcgcacgagggagcttccagggggaaacgcctggtatctttatagtcctgtcgggtttcgccacctctgacttgagcgtcgatttttgtgatgctcgtcaggggggcggagcctatggaaaaacgccagcaacgcggcctttttacggttcctggccttttgctggccttttgctcacatgttctttcctgcgttatcccctgattctgtggataaccgtattaccgcctttgagtgagctgataccgctcgccgcagccgaacgaccgagcgcagcgagtcagtgagcgaggaagcggaagagcgcccaatacgcaaaccgcctctccccgcgcgttggccgattcattaatgcagctggcacgacaggtttcccgactggaaagcgggcagtgagcgcaacgcaattaatgtgagttagctcactcattaggcaccccaggctttacactttatgcttccggctcgtatgttgtgtggaattgtgagcggataacaatttcacacaggaaacagctatgaccatgattacgcctctagaaagctttaatacgactcactataaggactcactatttgttttcgcgcccagttgcaaaaagtgtcgacatttgcttctgacacaactgtgttcactagcaacctcaaacagacaccttaattaagccaccatgcggacactggtgaccttcaaggatgtatttgtggacttcaccagggaggagtggaagctgctggacactgctcagcagatcgtgtacagaaatgtgatgctggagaactataagaacctggtttccttgggttatcagcttactaagccagatgtgatcctccggttggagaagggagaagagcccagcggcagcgagacccccggtaccagcgagagcgccacccccgagagcatgaaccatgaccaggaatttgaccccccaaaggtttacccacctgtgccagctgagaagaggaagcccatccgcgtgctgtctctctttgatgggattgctacagggctcctggtgctgaaggacctgggcatccaagtggaccgctacattgcctccgaggtgtgtgaggactccatcacggtgggcatggtgcggcaccagggaaagatcatgtacgtcggggacgtccgcagcgtcacacagaagcatatccaggagtggggcccattcgacctggtgattggaggcagtccctgcaatgacctctccattgtcaaccctgcccgcaagggactttatgagggtactggccgcctcttctttgagttctaccgcctcctgcatgatgcgcggcccaaggagggagatgatcgccccttcttctggctctttgagaatgtggtggccatgggcgttagtgacaagagggacatctcgcgatttcttgagtctaaccccgtgatgattgacgccaaagaagtgtctgctgcacacagggcccgttacttctggggtaaccttcctggcatgaacaggcctttggcatccactgtgaatgataagctggagctgcaagagtgtctggagcacggcagaatagccaagttcagcaaagtgaggaccattaccaccaggtcaaactctataaagcagggcaaagaccagcatttccccgtcttcatgaacgagaaggaggacatcctgtggtgcactgaaatggaaagggtgtttggcttccccgtccactacacagacgtctccaacatgagccgcttggcgaggcagagactgctgggccgatcgtggagcgtgccggtcatccgccacctcttcgctccgctgaaggaatattttgcttgtgtgtctagcggcaatagtaacgctaacagccgcgggccgagcttcagcagcggcctggtgccgttaagcttgcgcggcagccatatgggccctatggagatatacaagacagtgtctgcatggaagagacagccagtgcgggtactgagcctcttcagaaacatcgacaaggtactaaagagtttgggcttcttggaaagcggttctggttctgggggaggaacgctgaagtacgtggaagatgtcacaaatgtcgtgaggagagacgtggagaaatggggcccctttgacctggtgtacggctcgacgcagcccctaggcagctcttgtgatcgctgtcccggctggtacatgttccagttccaccggatcctgcagtatgcgctgcctcgccaggagagtcagcggcccttcttctggatattcatggacaatctgctgctgactgaggatgaccaagagacaactacccgcttccttcagacagaggctgtgaccctccaggatgtccgtggcagagactaccagaatgctatgcgggtgtggagcaacattccagggctgaagagcaagcatgcgcccctgaccccaaaggaagaagagtatctgcaagcccaagtcagaagcaggagcaagctggacgccccgaaagttgacctcctggtgaagaactgccttctcccgctgagagagtacttcaagtatttttctcaaaactcacttcctcttggagggccgagctctggcgcacccccaccaagtggagggtctcctgccgggtccccaacatctactgaagaaggcaccagcgaatccgcaacgcccgagtcaggccctggtacctccacagaaccatctgaaggtagtgcgcctggttccccagctggaagccctacttccaccgaagaaggcacgtcaaccgaaccaagtgaaggatctgcccctgggaccagcactgaaccatctgagccaaaaaagaagagaaaggtaatggacaagaagtacagcatcggcctggccatcggcaccaactctgtgggctgggccgtgatcaccgacgagtacaaggtgcccagcaagaaattcaaggtgctgggcaacaccgaccggcacagcatcaagaagaacctgatcggcgccctgctgttcgacagcggagaaacagccgaggccacccggctgaagagaaccgccagaagaagatacaccagacggaagaaccggatctgctatctgcaagagatcttcagcaacgagatggccaaggtggacgacagcttcttccacagactggaagagtccttcctggtggaagaggataagaagcacgagcggcaccccatcttcggcaacatcgtggacgaggtggcctaccacgagaagtaccccaccatctaccacctgagaaagaaactggtggacagcaccgacaaggccgacctgcggctgatctatctggccctggcccacatgatcaagttccggggccacttcctgatcgagggcgacctgaaccccgacaacagcgacgtggacaagctgttcatccagctggtgcagacctacaaccagctgttcgaggaaaaccccatcaacgccagcggcgtggacgccaaggccatcctgtctgccagactgagcaagagcagacggctggaaaatctgatcgcccagctgcccggcgagaagaagaatggcctgttcggcaacctgattgccctgagcctgggcctgacccccaacttcaagagcaacttcgacctggccgaggatgccaaactgcagctgagcaaggacacctacgacgacgacctggacaacctgctggcccagatcggcgaccagtacgccgacctgtttctggccgccaagaacctgtccgacgccatcctgctgagcgacatcctgagagtgaacaccgagatcaccaaggcccccctgagcgcctctatgatcaagagatacgacgagcaccaccaggacctgaccctgctgaaagctctcgtgcggcagcagctgcctgagaagtacaaagagattttcttcgaccagagcaagaacggctacgccggctacatcgatggcggagccagccaggaagagttctacaagttcatcaagcccatcctggaaaagatggacggcaccgaggaactgctcgtgaagctgaacagagaggacctgctgcggaagcagcggaccttcgacaacggcagcatcccccaccagatccacctgggagagctgcacgccattctgcggcggcaggaagatttttacccattcctgaaggacaaccgggaaaagatcgagaagatcctgaccttccgcatcccctactacgtgggccctctggccaggggaaacagcagattcgcctggatgaccagaaagagcgaggaaaccatcaccccctggaacttcgaggaagtggtggacaagggcgccagcgcccagagcttcatcgagcggatgaccaacttcgataagaacctgcccaacgagaaggtgctgcccaagcacagcctgctgtacgagtacttcaccgtgtacaacgagctgaccaaagtgaaatacgtgaccgagggaatgagaaagcccgccttcctgagcggcgagcagaaaaaagccatcgtggacctgctgttcaagaccaaccggaaagtgaccgtgaagcagctgaaagaggactacttcaagaaaatcgagtgcttcgactccgtggaaatctccggcgtggaagatcggttcaacgcctccctgggcacataccacgatctgctgaaaattatcaaggacaaggacttcctggacaatgaggaaaacgaggacattctggaagatatcgtgctgaccctgacactgtttgaggacagagagatgatcgaggaacggctgaaaacctatgcccacctgttcgacgacaaagtgatgaagcagctgaagcggcggagatacaccggctggggcaggctgagccggaagctgatcaacggcatccgggacaagcagtccggcaagacaatcctggatttcctgaagtccgacggcttcgccaacagaaacttcatgcagctgatccacgacgacagcctgacctttaaagaggacatccagaaagcccaggtgtccggccagggcgatagcctgcacgagcacattgccaatctggccggcagccccgccattaagaagggcatcctgcagacagtgaaggtggtggacgagctcgtgaaagtgatgggccggcacaagcccgagaacatcgtgatcgaaatggccagagagaaccagaccacccagaagggacagaagaacagccgcgagagaatgaagcggatcgaagagggcatcaaagagctgggcagccagatcctgaaagaacaccccgtggaaaacacccagctgcagaacgagaagctgtacctgtactacctgcagaatgggcgggatatgtacgtggaccaggaactggacatcaaccggctgtccgactacgatgtggacgctatcgtgcctcagagctttctgaaggacgactccatcgataacaaagtgctgactcggagcgacaagaaccggggcaagagcgacaacgtgccctccgaagaggtcgtgaagaagatgaagaactactggcgccagctgctgaatgccaagctgattacccagaggaagttcgacaatctgaccaaggccgagagaggcggcctgagcgaactggataaggccggcttcatcaagagacagctggtggaaacccggcagatcacaaagcacgtggcacagatcctggactcccggatgaacactaagtacgacgagaacgacaaactgatccgggaagtgaaagtgatcaccctgaagtccaagctggtgtccgatttccggaaggatttccagttttacaaagtgcgcgagatcaacaactaccaccacgcccacgacgcctacctgaacgccgtcgtgggaaccgccctgatcaaaaagtaccctaagctggaaagcgagttcgtgtacggcgactacaaggtgtacgacgtgcggaagatgatcgccaagagcgagcaggaaatcggcaaggctaccgccaagtacttcttctacagcaacatcatgaactttttcaagaccgagattaccctggccaacggcgagatccggaagcggcctctgatcgagacaaacggcgaaacaggcgagatcgtgtgggataagggccgggactttgccaccgtgcggaaagtgctgtctatgccccaagtgaatatcgtgaaaaagaccgaggtgcagacaggcggcttcagcaaagagtctatcctgcccaagaggaacagcgacaagctgatcgccagaaagaaggactgggaccctaagaagtacggcggcttcgacagccccaccgtggcctattctgtgctggtggtggccaaagtggaaaagggcaagtccaagaaactgaagagtgtgaaagagctgctggggatcaccatcatggaaagaagcagcttcgagaagaatcccatcgactttctggaagccaagggctacaaagaagtgaaaaaggacctgatcatcaagctgcctaagtactccctgttcgagctggaaaacggccggaagagaatgctggcctctgccggcgaactgcagaagggaaacgaactggccctgccctccaaatatgtgaacttcctgtacctggccagccactatgagaagctgaagggctcccccgaggataatgagcagaaacagctgtttgtggaacagcacaaacactacctggacgagatcatcgagcagatcagcgagttctccaagagagtgatcctggccgacgctaatctggacaaggtgctgagcgcctacaacaagcacagagacaagcctatcagagagcaggccgagaatatcatccacctgtttaccctgaccaatctgggagcccctgccgccttcaagtactttgacaccaccatcgaccggaagaggtacaccagcaccaaagaggtgctggacgccaccctgatccaccagagcatcaccggcctgtacgagacacggatcgacctgtctcagctgggaggcgacgcctatccctatgacgtgcccgattatgccagcctgggcagcggctcccccaagaaaaaacgcaaggtggaagatcctaagaaaaagcggaaagtggacggcctcgaggctactaacttcagcctgctgaagcaggctggagacgtggaggagaaccctggacctatgcattaatgagatcccaagcacgcagcaatgcagctcaaaacgcttagcctagccacacccccacgggaaacagcagtgattaacctttagcaataaacgaaagtttaactaagctatactaaccccagggttggtcaatttcgtgccagccacaccctggtactgcatgcacgcaatgctagctgcccctttcccgtcctgggcaccccgagtctcccccgaccccgggtcccaggtatgctcccacctccacctgccccactcaccacctctgctagttccagacacctccgagacgaggaaaaaaaaaaaaaaaaaaaaaaaaaaaaaaaaaaaaaaaaaaaaaaaaaaaaaaaaaaaaaaaaaaaaaaaaaaaaaaaaaaaaaaaaaaaaaaaaaaaaaaaaaaaaaaaaaaaaaaaaaaaaaaaaaaaaaaaaaaaaaaaaaaaaaaaaaaaaaaaaaaaaaaaaaaaaaaaaaaaaaaaaaaaaaaaaaaaaaaaaaaaaaaaaaaaaaaaaaaaaaaaaaaaaaaaaaaaaaaaaaaaaaaaaaaaaaaaaaaaaaaaaaaaaaaaaaaaaaaaaaaaaaaaaaaaaaaaaaaaaaaaaaaaaaaaaaaaaaaaaaaaaaaaaaaaaaaaaaaaaaaaaaaaaaaaaaaaaaaaaaaaaaaaaaaaaaaaaaaaaaaaaaaaaaaaaaaccgtcttcaagctttctagaaattcactggccgtcgttttacaacgtcgtgactgggaaaaccctggcgttacccaacttaatcgccttgcagcacatccccctttcgccagctggcgtaatagcgaagaggcccgcaccgatcgcccttcccaacagttgcgcagcctgaatggcgaatggcgcctgatgcggtattttctccttacgcatctgtgcggtatttcacaccgcatatggtgcactctcagtacaatctgctctgatgccgcatagttaagccagccccgacacccgccaacacccgctgacgcgccctgacgggcttgtctgctcccggcatccgcttacagacaagctgtgaccgtctccgggagctgcatgtgtcagaggttttcaccgtcatcaccgaaacgcgcgagacgaaagggcctcgtgatacgcctatttttataggttaatgtcatgataataatggtttcttagacgtcaggtggcacttttcggggaaatgtgcgcggaacccctatttgtttatttttctaaatacattcaaatatgtatccgctcatgagacaataaccctgataaatgcttcaataatattgaaaaaggaagagtatgagtattcaacatttccgtgtcgcccttattcccttttttgcggcattttgccttcctgtttttgctcacccagaaacgctggtgaaagtaaaagatgctgaagatcagttgggtgcacgagtgggttacatcgaactggatctcaacagcggtaagatccttgagagttttcgccccgaagaacgttttccaatgatgagcacttttaaagttctgctatgtggcgcggtattatcccgtattgacgccgggcaagagcaactcggtcgccgcatacactattctcagaatgacttggttgagtactcaccagtcacagaaaagcatcttacggatggcatgacagtaagagaattatgcagtgctgccataaccatgagtgataacactgcggccaacttacttctgacaacgatcggaggaccgaaggagctaaccgc

SEQ ID NO: 141 - DNA, 9951 bp, synthetic construct
  misc_feature 1..9951: note = V23 DNA
  source 1..9951: mol_type = other DNA
ccttaacgtgagttttcgttccactgagcgtcagaccccgtagaaaagatcaaaggatcttcttgagatcctttttttctgcgcgtaatctgctgcttgcaaacaaaaaaaccaccgctaccagcggtggtttgtttgccggatcaagagctaccaactctttttccgaaggtaactggcttcagcagagcgcagataccaaatactgttcttctagtgtagccgtagttaggccaccacttcaagaactctgtagcaccgcctacatacctcgctctgctaatcctgttaccagtggctgctgccagtggcgataagtcgtgtcttaccgggttggactcaagacgatagttaccggataaggcgcagcggtcgggctgaacggggggttcgtgcacacagcccagcttggagcgaacgacctacaccgaactgagatacctacagcgtgagctatgagaaagcgccacgcttcccgaagggagaaaggcggacaggtatccggtaagcggcagggtcggaacaggagagcgcacgagggagcttccagggggaaacgcctggtatctttatagtcctgtcgggtttcgccacctctgacttgagcgtcgatttttgtgatgctcgtcaggggggcggagcctatggaaaaacgccagcaacgcggcctttttacggttcctggccttttgctggccttttgctcacatgttctttcctgcgttatcccctgattctgtggataaccgtattaccgcctttgagtgagctgataccgctcgccgcagccgaacgaccgagcgcagcgagtcagtgagcgaggaagcggaagagcgcccaatacgcaaaccgcctctccccgcgcgttggccgattcattaatgcagctggcacgacaggtttcccgactggaaagcgggcagtgagcgcaacgcaattaatgtgagttagctcactcattaggcaccccaggctttacactttatgcttccggctcgtatgttgtgtggaattgtgagcggataacaatttcacacaggaaacagctatgaccatgattacgcctctagaaagctttaatacgactcactataaggactcactatttgttttcgcgcccagttgcaaaaagtgtcgacatttgcttctgacacaactgtgttcactagcaacctcaaacagacaccgccaccatggtccctgctgctaagagagtgaaactggatggatccgacaagaagtacagcatcggcctggccatcggcaccaactctgtgggctgggccgtgatcaccgacgagtacaaggtgcccagcaagaaattcaaggtgctgggcaacaccgaccggcacagcatcaagaagaacctgatcggcgccctgctgttcgacagcggagaaacagccgaggccacccggctgaagagaaccgccagaagaagatacaccagacggaagaaccggatctgctatctgcaagagatcttcagcaacgagatggccaaggtggacgacagcttcttccacagactggaagagtccttcctggtggaagaggataagaagcacgagcggcaccccatcttcggcaacatcgtggacgaggtggcctaccacgagaagtaccccaccatctaccacctgagaaagaaactggtggacagcaccgacaaggccgacctgcggctgatctatctggccctggcccacatgatcaagttccggggccacttcctgatcgagggcgacctgaaccccgacaacagcgacgtggacaagctgttcatccagctggtgcagacctacaaccagctgttcgaggaaaaccccatcaacgccagcggcgtggacgccaaggccatcctgtctgccagactgagcaagagcagacggctggaaaatctgatcgcccagctgcccggcgagaagaagaatggcctgttcggcaacctgattgccctgagcctgggcctgacccccaacttcaagagcaacttcgacctggccgaggatgccaaactgcagctgagcaaggacacctacgacgacgacctggacaacctgctggcccagatcggcgaccagtacgccgacctgtttctggccgccaagaacctgtccgacgccatcctgctgagcgacatcctgagagtgaacaccgagatcaccaaggcccccctgagcgcctctatgatcaagagatacgacgagcaccaccaggacctgaccctgctgaaagctctcgtgcggcagcagctgcctgagaagtacaaagagattttcttcgaccagagcaagaacggctacgccggctacatcgatggcggagccagccaggaagagttctacaagttcatcaagcccatcctggaaaagatggacggcaccgaggaactgctcgtgaagctgaacagagaggacctgctgcggaagcagcggaccttcgacaacggcagcatcccccaccagatccacctgggagagctgcacgccattctgcggcggcaggaagatttttacccattcctgaaggacaaccgggaaaagatcgagaagatcctgaccttccgcatcccctactacgtgggccctctggccaggggaaacagcagattcgcctggatgaccagaaagagcgaggaaaccatcaccccctggaacttcgaggaagtggtggacaagggcgccagcgcccagagcttcatcgagcggatgaccaacttcgataagaacctgcccaacgagaaggtgctgcccaagcacagcctgctgtacgagtacttcaccgtgtacaacgagctgaccaaagtgaaatacgtgaccgagggaatgagaaagcccgccttcctgagcggcgagcagaaaaaagccatcgtggacctgctgttcaagaccaaccggaaagtgaccgtgaagcagctgaaagaggactacttcaagaaaatcgagtgcttcgactccgtggaaatctccggcgtggaagatcggttcaacgcctccctgggcacataccacgatctgctgaaaattatcaaggacaaggacttcctggacaatgaggaaaacgaggacattctggaagatatcgtgctgaccctgacactgtttgaggacagagagatgatcgaggaacggctgaaaacctatgcccacctgttcgacgacaaagtgatgaagcagctgaagcggcggagatacaccggctggggcaggctgagccggaagctgatcaacggcatccgggacaagcagtccggcaagacaatcctggatttcctgaagtccgacggcttcgccaacagaaacttcatgcagctgatccacgacgacagcctgacctttaaagaggacatccagaaagcccaggtgtccggccagggcgatagcctgcacgagcacattgccaatctggccggcagccccgccattaagaagggcatcctgcagacagtgaaggtggtggacgagctcgtgaaagtgatgggccggcacaagcccgagaacatcgtgatcgaaatggccagagagaaccagaccacccagaagggacagaagaacagccgcgagagaatgaagcggatcgaagagggcatcaaagagctgggcagccagatcctgaaagaacaccccgtggaaaacacccagctgcagaacgagaagctgtacctgtactacctgcagaatgggcgggatatgtacgtggaccaggaactggacatcaaccggctgtccgactacgatgtggacgctatcgtgcctcagagctttctgaaggacgactccatcgataacaaagtgctgactcggagcgacaagaaccggggcaagagcgacaacgtgccctccgaagaggtcgtgaagaagatgaagaactactggcgccagctgctgaatgccaagctgattacccagaggaagttcgacaatctgaccaaggccgagagaggcggcctgagcgaactggataaggccggcttcatcaagagacagctggtggaaacccggcagatcacaaagcacgtggcacagatcctggactcccggatgaacactaagtacgacgagaacgacaaactgatccgggaagtgaaagtgatcaccctgaagtccaagctggtgtccgatttccggaaggatttccagttttacaaagtgcgcgagatcaacaactaccaccacgcccacgacgcctacctgaacgccgtcgtgggaaccgccctgatcaaaaagtaccctaagctggaaagcgagttcgtgtacggcgactacaaggtgtacgacgtgcggaagatgatcgccaagagcgagcaggaaatcggcaaggctaccgccaagtacttcttctacagcaacatcatgaactttttcaagaccgagattaccctggccaacggcgagatccggaagcggcctctgatcgagacaaacggcgaaacaggcgagatcgtgtgggataagggccgggactttgccaccgtgcggaaagtgctgtctatgccccaagtgaatatcgtgaaaaagaccgaggtgcagacaggcggcttcagcaaagagtctatcctgcccaagaggaacagcgacaagctgatcgccagaaagaaggactgggaccctaagaagtacggcggcttcgacagccccaccgtggcctattctgtgctggtggtggccaaagtggaaaagggcaagtccaagaaactgaagagtgtgaaagagctgctggggatcaccatcatggaaagaagcagcttcgagaagaatcccatcgactttctggaagccaagggctacaaagaagtgaaaaaggacctgatcatcaagctgcctaagtactccctgttcgagctggaaaacggccggaagagaatgctggcctctgccggcgaactgcagaagggaaacgaactggccctgccctccaaatatgtgaacttcctgtacctggccagccactatgagaagctgaagggctcccccgaggataatgagcagaaacagctgtttgtggaacagcacaaacactacctggacgagatcatcgagcagatcagcgagttctccaagagagtgatcctggccgacgctaatctggacaaggtgctgagcgcctacaacaagcacagagacaagcctatcagagagcaggccgagaatatcatccacctgtttaccctgaccaatctgggagcccctgccgccttcaagtactttgacaccaccatcgaccggaagaggtacaccagcaccaaagaggtgctggacgccaccctgatccaccagagcatcaccggcctgtacgagacacggatcgacctgtctcagctgggaggcgacgcctatccctatgacgtgcccgattatgccagcctgggcagcggctcccccaagaaaaaacgcaaggtggaagatcctaagaaaaagcggaaagtggacggcggagggccgagctctggcgcacccccaccaagtggagggtctcctgccgggtccccaacatctactgaagaaggcaccagcgaatccgcaacgcccgagtcaggccctggtacctccacagaaccatctgaaggtagtgcgcctggttccccagctggaagccctacttccaccgaagaaggcacgtcaaccgaaccaagtgaaggatctgcccctgggaccagcactgaaccatctgagatgggccctatggagatatacaagacagtgtctgcatggaagagacagccagtgcgggtactgagcctcttcagaaacatcgacaaggtactaaagagtttgggcttcttggaaagcggttctggttctgggggaggaacgctgaagtacgtggaagatgtcacaaatgtcgtgaggagagacgtggagaaatggggcccctttgacctggtgtacggctcgacgcagcccctaggcagctcttgtgatcgctgtcccggctggtacatgttccagttccaccggatcctgcagtatgcgctgcctcgccaggagagtcagcggcccttcttctggatattcatggacaatctgctgctgactgaggatgaccaagagacaactacccgcttccttcagacagaggctgtgaccctccaggatgtccgtggcagagactaccagaatgctatgcgggtgtggagcaacattccagggctgaagagcaagcatgcgcccctgaccccaaaggaagaagagtatctgcaagcccaagtcagaagcaggagcaagctggacgccccgaaagttgacctcctggtgaagaactgccttctcccgctgagagagtacttcaagtatttttctcaaaactcacttcctctttctagcggcaatagtaacgctaacagccgcgggccgagcttcagcagcggcctggtgccgttaagcttgcgcggcagccatatgaaccatgaccaggaatttgaccccccaaaggtttacccacctgtgccagctgagaagaggaagcccatccgcgtgctgtctctctttgatgggattgctacagggctcctggtgctgaaggacctgggcatccaagtggaccgctacattgcctccgaggtgtgtgaggactccatcacggtgggcatggtgcggcaccagggaaagatcatgtacgtcggggacgtccgcagcgtcacacagaagcatatccaggagtggggcccattcgacctggtgattggaggcagtccctgcaatgacctctccattgtcaaccctgcccgcaagggactttatgagggtactggccgcctcttctttgagttctaccgcctcctgcatgatgcgcggcccaaggagggagatgatcgccccttcttctggctctttgagaatgtggtggccatgggcgttagtgacaagagggacatctcgcgatttcttgagtctaaccccgtgatgattgacgccaaagaagtgtctgctgcacacagggcccgttacttctggggtaaccttcctggcatgaacaggcctttggcatccactgtgaatgataagctggagctgcaagagtgtctggagcacggcagaatagccaagttcagcaaagtgaggaccattaccaccaggtcaaactctataaagcagggcaaagaccagcatttccccgtcttcatgaacgagaaggaggacatcctgtggtgcactgaaatggaaagggtgtttggcttccccgtccactacacagacgtctccaacatgagccgcttggcgaggcagagactgctgggccgatcgtggagcgtgccggtcatccgccacctcttcgctccgctgaaggaatattttgcttgtgtggacggcagcggcagcgagacccccggtaccagcgagagcgccacccccgagagcatgaacaattcccagggaagagtgaccttcgaggatgtcactgtgaacttcacccagggggagtggcagcggctgaatcccgaacagagaaacttgtacagggatgtgatgctggagaattacagcaaccttgtctctgtgggacaaggggaaaccaccaaacccgatgtgatcttgaggttggaacaaggaaaggagccatggttggaggaagaggaagtgctgggaagtggccgtgcagaaaaaaatggggacattggagggcagatttggaagccaaaggatgtgaaagagagtctcctcgagtgataatagggatcccaagcacgcagcaatgcagctcaaaacgcttagcctagccacacccccacgggaaacagcagtgattaacctttagcaataaacgaaagtttaactaagctatactaaccccagggttggtcaatttcgtgccagccacaccctggtactgcatgcacgcaatgctagctgcccctttcccgtcctgggcaccccgagtctcccccgaccccgggtcccaggtatgctcccacctccacctgccccactcaccacctctgctagttccagacacctccgaagatggaaaaaaaaaaaaaaaaaaaaaaaaaaaaaaaaaaaaaaaaaaaaaaaaaaaaaaaaaaaaaaaaaaaaaaaaaaaaaaaaaaaaaaaaaaaaaaaaaaaaaaaaaaaaaaaaaaaaaaaaaaaaaaaaaaaaaaaaaaaaaaaaaaaaaaaaaaaaaaaaaaaaaaaaaaaaaaaaaaaaaaaaaaaaaaaaaaaaaaaaaaaaaaaaaaaaaaaaaaaaaaaaaaaaaaaaaaaaaaaaaaaaaaaaaaaaaaaaaaaaaaaaaaaaaaaaaaaaaaaaaaaaaaaaaaaaaaaaaaaaaaaaaaaaaaaaaaaaaaaaaaaaaaaaaaaaaaaaaaaaaaaaaaaaaaaaaaaaaaaaaaaaaaaaaaaaaaaaaaaaaaaaaaaaaaaaaaccgtcttcaagctttctagaaattcactggccgtcgttttacaacgtcgtgactgggaaaaccctggcgttacccaacttaatcgccttgcagcacatccccctttcgccagctggcgtaatagcgaagaggcccgcaccgatcgcccttcccaacagttgcgcagcctgaatggcgaatggcgcctgatgcggtattttctccttacgcatctgtgcggtatttcacaccgcatatggtgcactctcagtacaatctgctctgatgccgcatagttaagccagccccgacacccgccaacacccgctgacgcgccctgacgggcttgtctgctcccggcatccgcttacagacaagctgtgaccgtctccgggagctgcatgtgtcagaggttttcaccgtcatcaccgaaacgcgcgagacgaaagggcctcgtgatacgcctatttttataggttaatgtcatgataataatggtttcttagacgtcaggtggcacttttcggggaaatgtgcgcggaacccctatttgtttatttttctaaatacattcaaatatgtatccgctcatgagacaataaccctgataaatgcttcaataatattgaaaaaggaagagtatgagtattcaacatttccgtgtcgcccttattcccttttttgcggcattttgccttcctgtttttgctcacccagaaacgctggtgaaagtaaaagatgctgaagatcagttgggtgcacgagtgggttacatcgaactggatctcaacagcggtaagatccttgagagttttcgccccgaagaacgttttccaatgatgagcacttttaaagttctgctatgtggcgcggtattatcccgtattgacgccgggcaagagcaactcggtcgccgcatacactattctcagaatgacttggttgagtactcaccagtcacagaaaagcatcttacggatggcatgacagtaagagaattatgcagtgctgccataaccatgagtgataacactgcggccaacttacttctgacaacgatcggaggaccgaaggagctaaccgcttttttgcacaacatgggggatcatgtaactcgccttgatcgttgggaaccggagctgaatgaagccataccaaacgacgagcgtgacaccacgatgcctgtagcaatggcaacaacgttgcgcaaactattaactggcgaactacttactctagcttcccggcaacaattaatagactggatggaggcggataaagttgcaggaccacttctgcgctcggcccttccggctggctggtttattgctgataaatctggagccggtgagcgtgggtcacgcggtatcattgcagcactggggccagatggtaagccctcccgtatcgtagttatctacacgacggggagtcaggcaactatggatgaacgaaatagacagatcgctgagataggtgcctcactgattaagcattggtaactgtcagaccaagtttactcatatatactttagattgatttaaaacttcatttttaatttaaaaggatctaggtgaagatcctttttgataatctcatgaccaaaatc

SEQ ID NO: 142 - DNA, 9824 bp, synthetic construct
  misc_feature 1..9824: note = V24 DNA
  source 1..9824: mol_type = other DNA
ccttaacgtgagttttcgttccactgagcgtcagaccccgtagaaaagatcaaaggatcttcttgagatcctttttttctgcgcgtaatctgctgcttgcaaacaaaaaaaccaccgctaccagcggtggtttgtttgccggatcaagagctaccaactctttttccgaaggtaactggcttcagcagagcgcagataccaaatactgttcttctagtgtagccgtagttaggccaccacttcaagaactctgtagcaccgcctacatacctcgctctgctaatcctgttaccagtggctgctgccagtggcgataagtcgtgtcttaccgggttggactcaagacgatagttaccggataaggcgcagcggtcgggctgaacggggggttcgtgcacacagcccagcttggagcgaacgacctacaccgaactgagatacctacagcgtgagctatgagaaagcgccacgcttcccgaagggagaaaggcggacaggtatccggtaagcggcagggtcggaacaggagagcgcacgagggagcttccagggggaaacgcctggtatctttatagtcctgtcgggtttcgccacctctgacttgagcgtcgatttttgtgatgctcgtcaggggggcggagcctatggaaaaacgccagcaacgcggcctttttacggttcctggccttttgctggccttttgctcacatgttctttcctgcgttatcccctgattctgtggataaccgtattaccgcctttgagtgagctgataccgctcgccgcagccgaacgaccgagcgcagcgagtcagtgagcgaggaagcggaagagcgcccaatacgcaaaccgcctctccccgcgcgttggccgattcattaatgcagctggcacgacaggtttcccgactggaaagcgggcagtgagcgcaacgcaattaatgtgagttagctcactcattaggcaccccaggctttacactttatgcttccggctcgtatgttgtgtggaattgtgagcggataacaatttcacacaggaaacagctatgaccatgattacgcctctagaaagctttaatacgactcactataaggactcactatttgttttcgcgcccagttgcaaaaagtgtcgacatttgcttctgacacaactgtgttcactagcaacctcaaacagacaccgccaccatggtccctgctgctaagagagtgaaactggatggatccgacaagaagtacagcatcggcctggccatcggcaccaactctgtgggctgggccgtgatcaccgacgagtacaaggtgcccagcaagaaattcaaggtgctgggcaacaccgaccggcacagcatcaagaagaacctgatcggcgccctgctgttcgacagcggagaaacagccgaggccacccggctgaagagaaccgccagaagaagatacaccagacggaagaaccggatctgctatctgcaagagatcttcagcaacgagatggccaaggtggacgacagcttcttccacagactggaagagtccttcctggtggaagaggataagaagcacgagcggcaccccatcttcggcaacatcgtggacgaggtggcctaccacgagaagtaccccaccatctaccacctgagaaagaaactggtggacagcaccgacaaggccgacctgcggctgatctatctggccctggcccacatgatcaagttccggggccacttcctgatcgagggcgacctgaaccccgacaacagcgacgtggacaagctgttcatccagctggtgcagacctacaaccagctgttcgaggaaaaccccatcaacgccagcggcgtggacgccaaggccatcctgtctgccagactgagcaagagcagacggctggaaaatctgatcgcccagctgcccggcgagaagaagaatggcctgttcggcaacctgattgccctgagcctgggcctgacccccaacttcaagagcaacttcgacctggccgaggatgccaaactgcagctgagcaaggacacctacgacgacgacctggacaacctgctggcccagatcggcgaccagtacgccgacctgtttctggccgccaagaacctgtccgacgccatcctgctgagcgacatcctgagagtgaacaccgagatcaccaaggcccccctgagcgcctctatgatcaagagatacgacgagcaccaccaggacctgaccctgctgaaagctctcgtgcggcagcagctgcctgagaagtacaaagagattttcttcgaccagagcaagaacggctacgccggctacatcgatggcggagccagccaggaagagttctacaagttcatcaagcccatcctggaaaagatggacggcaccgaggaactgctcgtgaagctgaacagagaggacctgctgcggaagcagcggaccttcgacaacggcagcatcccccaccagatccacctgggagagctgcacgccattctgcggcggcaggaagatttttacccattcctgaaggacaaccgggaaaagatcgagaagatcctgaccttccgcatcccctactacgtgggccctctggccaggggaaacagcagattcgcctggatgaccagaaagagcgaggaaaccatcaccccctggaacttcgaggaagtggtggacaagggcgccagcgcccagagcttcatcgagcggatgaccaacttcgataagaacctgcccaacgagaaggtgctgcccaagcacagcctgctgtacgagtacttcaccgtgtacaacgagctgaccaaagtgaaatacgtgaccgagggaatgagaaagcccgccttcctgagcggcgagcagaaaaaagccatcgtggacctgctgttcaagaccaaccggaaagtgaccgtgaagcagctgaaagaggactacttcaagaaaatcgagtgcttcgactccgtggaaatctccggcgtggaagatcggttcaacgcctccctgggcacataccacgatctgctgaaaattatcaaggacaaggacttcctggacaatgaggaaaacgaggacattctggaagatatcgtgctgaccctgacactgtttgaggacagagagatgatcgaggaacggctgaaaacctatgcccacctgttcgacgacaaagtgatgaagcagctgaagcggcggagatacaccggctggggcaggctgagccggaagctgatcaacggcatccgggacaagcagtccggcaagacaatcctggatttcctgaagtccgacggcttcgccaacagaaacttcatgcagctgatccacgacgacagcctgacctttaaagaggacatccagaaagcccaggtgtccggccagggcgatagcctgcacgagcacattgccaatctggccggcagccccgccattaagaagggcatcctgcagacagtgaaggtggtggacgagctcgtgaaagtgatgggccggcacaagcccgagaacatcgtgatcgaaatggccagagagaaccagaccacccagaagggacagaagaacagccgcgagagaatgaagcggatcgaagagggcatcaaagagctgggcagccagatcctgaaagaacaccccgtggaaaacacccagctgcagaacgagaagctgtacctgtactacctgcagaatgggcgggatatgtacgtggaccaggaactggacatcaaccggctgtccgactacgatgtggacgctatcgtgcctcagagctttctgaaggacgactccatcgataacaaagtgctgactcggagcgacaagaaccggggcaagagcgacaacgtgccctccgaagaggtcgtgaagaagatgaagaactactggcgccagctgctgaatgccaagctgattacccagaggaagttcgacaatctgaccaaggccgagagaggcggcctgagcgaactggataaggccggcttcatcaagagacagctggtggaaacccggcagatcacaaagcacgtggcacagatcctggactcccggatgaacactaagtacgacgagaacgacaaactgatccgggaagtgaaagtgatcaccctgaagtccaagctggtgtccgatttccggaaggatttccagttttacaaagtgcgcgagatcaacaactaccaccacgcccacgacgcctacctgaacgccgtcgtgggaaccgccctgatcaaaaagtaccctaagctggaaagcgagttcgtgtacggcgactacaaggtgtacgacgtgcggaagatgatcgccaagagcgagcaggaaatcggcaaggctaccgccaagtacttcttctacagcaacatcatgaactttttcaagaccgagattaccctggccaacggcgagatccggaagcggcctctgatcgagacaaacggcgaaacaggcgagatcgtgtgggataagggccgggactttgccaccgtgcggaaagtgctgtctatgccccaagtgaatatcgtgaaaaagaccgaggtgcagacaggcggcttcagcaaagagtctatcctgcccaagaggaacagcgacaagctgatcgccagaaagaaggactgggaccctaagaagtacggcggcttcgacagccccaccgtggcctattctgtgctggtggtggccaaagtggaaaagggcaagtccaagaaactgaagagtgtgaaagagctgctggggatcaccatcatggaaagaagcagcttcgagaagaatcccatcgactttctggaagccaagggctacaaagaagtgaaaaaggacctgatcatcaagctgcctaagtactccctgttcgagctggaaaacggccggaagagaatgctggcctctgccggcgaactgcagaagggaaacgaactggccctgccctccaaatatgtgaacttcctgtacctggccagccactatgagaagctgaagggctcccccgaggataatgagcagaaacagctgtttgtggaacagcacaaacactacctggacgagatcatcgagcagatcagcgagttctccaagagagtgatcctggccgacgctaatctggacaaggtgctgagcgcctacaacaagcacagagacaagcctatcagagagcaggccgagaatatcatccacctgtttaccctgaccaatctgggagcccctgccgccttcaagtactttgacaccaccatcgaccggaagaggtacaccagcaccaaagaggtgctggacgccaccctgatccaccagagcatcaccggcctgtacgagacacggatcgacctgtctcagctgggaggcgacgcctatccctatgacgtgcccgattatgccagcctgggcagcggctcccccaagaaaaaacgcaaggtggaagatcctaagaaaaagcggaaagtggacggcggagggccgagctctggcgcacccccaccaagtggagggtctcctgccgggtccccaacatctactgaagaaggcaccagcgaatccgcaacgcccgagtcaggccctggtacctccacagaaccatctgaaggtagtgcgcctggttccccagctggaagccctacttccaccgaagaaggcacgtcaaccgaaccaagtgaaggatctgcccctgggaccagcactgaaccatctgagatgaaccatgaccaggaatttgaccccccaaaggtttacccacctgtgccagctgagaagaggaagcccatccgcgtgctgtctctctttgatgggattgctacagggctcctggtgctgaaggacctgggcatccaagtggaccgctacattgcctccgaggtgtgtgaggactccatcacggtgggcatggtgcggcaccagggaaagatcatgtacgtcggggacgtccgcagcgtcacacagaagcatatccaggagtggggcccattcgacctggtgattggaggcagtccctgcaatgacctctccattgtcaaccctgcccgcaagggactttatgagggtactggccgcctcttctttgagttctaccgcctcctgcatgatgcgcggcccaaggagggagatgatcgccccttcttctggctctttgagaatgtggtggccatgggcgttagtgacaagagggacatctcgcgatttcttgagtctaaccccgtgatgattgacgccaaagaagtgtctgctgcacacagggcccgttacttctggggtaaccttcctggcatgaacaggcctttggcatccactgtgaatgataagctggagctgcaagagtgtctggagcacggcagaatagccaagttcagcaaagtgaggaccattaccaccaggtcaaactctataaagcagggcaaagaccagcatttccccgtcttcatgaacgagaaggaggacatcctgtggtgcactgaaatggaaagggtgtttggcttccccgtccactacacagacgtctccaacatgagccgcttggcgaggcagagactgctgggccgatcgtggagcgtgccggtcatccgccacctcttcgctccgctgaaggaatattttgcttgtgtgtctagcggcaatagtaacgctaacagccgcgggccgagcttcagcagcggcctggtgccgttaagcttgcgcggcagccatatgggccctatggagatatacaagacagtgtctgcatggaagagacagccagtgcgggtactgagcctcttcagaaacatcgacaaggtactaaagagtttgggcttcttggaaagcggttctggttctgggggaggaacgctgaagtacgtggaagatgtcacaaatgtcgtgaggagagacgtggagaaatggggcccctttgacctggtgtacggctcgacgcagcccctaggcagctcttgtgatcgctgtcccggctggtacatgttccagttccaccggatcctgcagtatgcgctgcctcgccaggagagtcagcggcccttcttctggatattcatggacaatctgctgctgactgaggatgaccaagagacaactacccgcttccttcagacagaggctgtgaccctccaggatgtccgtggcagagactaccagaatgctatgcgggtgtggagcaacattccagggctgaagagcaagcatgcgcccctgaccccaaaggaagaagagtatctgcaagcccaagtcagaagcaggagcaagctggacgccccgaaagttgacctcctggtgaagaactgccttctcccgctgagagagtacttcaagtatttttctcaaaactcacttcctcttgacggcagcggcagcgagacccccggtaccagcgagagcgccacccccgagagccggacactggtgaccttcaaggatgtatttgtggacttcaccagggaggagtggaagctgctggacactgctcagcagatcgtgtacagaaatgtgatgctggagaactataagaacctggtttccttgggttatcagcttactaagccagatgtgatcctccggttggagaagggagaagagccctgagatcccaagcacgcagcaatgcagctcaaaacgcttagcctagccacacccccacgggaaacagcagtgattaacctttagcaataaacgaaagtttaactaagctatactaaccccagggttggtcaatttcgtgccagccacaccctggtactgcatgcacgcaatgctagctgcccctttcccgtcctgggcaccccgagtctcccccgaccccgggtcccaggtatgctcccacctccacctgccccactcaccacctctgctagttccagacacctccgaagatggaaaaaaaaaaaaaaaaaaaaaaaaaaaaaaaaaaaaaaaaaaaaaaaaaaaaaaaaaaaaaaaaaaaaaaaaaaaaaaaaaaaaaaaaaaaaaaaaaaaaaaaaaaaaaaaaaaaaaaaaaaaaaaaaaaaaaaaaaaaaaaaaaaaaaaaaaaaaaaaaaaaaaaaaaaaaaaaaaaaaaaaaaaaaaaaaaaaaaaaaaaaaaaaaaaaaaaaaaaaaaaaaaaaaaaaaaaaaaaaaaaaaaaaaaaaaaaaaaaaaaaaaaaaaaaaaaaaaaaaaaaaaaaaaaaaaaaaaaaaaaaaaaaaaaaaaaaaaaaaaaaaaaaaaaaaaaaaaaaaaaaaaaaaaaaaaaaaaaaaaaaaaaaaaaaaaaaaaaaaaaaaaaaaaaaaaaaccgtcttcaagctttctagaaattcactggccgtcgttttacaacgtcgtgactgggaaaaccctggcgttacccaacttaatcgccttgcagcacatccccctttcgccagctggcgtaatagcgaagaggcccgcaccgatcgcccttcccaacagttgcgcagcctgaatggcgaatggcgcctgatgcggtattttctccttacgcatctgtgcggtatttcacaccgcatatggtgcactctcagtacaatctgctctgatgccgcatagttaagccagccccgacacccgccaacacccgctgacgcgccctgacgggcttgtctgctcccggcatccgcttacagacaagctgtgaccgtctccgggagctgcatgtgtcagaggttttcaccgtcatcaccgaaacgcgcgagacgaaagggcctcgtgatacgcctatttttataggttaatgtcatgataataatggtttcttagacgtcaggtggcacttttcggggaaatgtgcgcggaacccctatttgtttatttttctaaatacattcaaatatgtatccgctcatgagacaataaccctgataaatgcttcaataatattgaaaaaggaagagtatgagtattcaacatttccgtgtcgcccttattcccttttttgcggcattttgccttcctgtttttgctcacccagaaacgctggtgaaagtaaaagatgctgaagatcagttgggtgcacgagtgggttacatcgaactggatctcaacagcggtaagatccttgagagttttcgccccgaagaacgttttccaatgatgagcacttttaaagttctgctatgtggcgcggtattatcccgtattgacgccgggcaagagcaactcggtcgccgcatacactattctcagaatgacttggttgagtactcaccagtcacagaaaagcatcttacggatggcatgacagtaagagaattatgcagtgctgccataaccatgagtgataacactgcggccaacttacttctgacaacgatcggaggaccgaaggagctaaccgcttttttgcacaacatgggggatcatgtaactcgccttgatcgttgggaaccggagctgaatgaagccataccaaacgacgagcgtgacaccacgatgcctgtagcaatggcaacaacgttgcgcaaactattaactggcgaactacttactctagcttcccggcaacaattaatagactggatggaggcggataaagttgcaggaccacttctgcgctcggcccttccggctggctggtttattgctgataaatctggagccggtgagcgtgggtcacgcggtatcattgcagcactggggccagatggtaagccctcccgtatcgtagttatctacacgacggggagtcaggcaactatggatgaacgaaatagacagatcgctgagataggtgcctcactgattaagcattggtaactgtcagaccaagtttactcatatatactttagattgatttaaaacttcatttttaatttaaaaggatctaggtgaagatcctttttgataatctcatgaccaaaatc

SEQ ID NO: 143 - DNA, 9824 bp, synthetic construct
  misc_feature 1..9824: note = V25 DNA
  source 1..9824: mol_type = other DNA
ccttaacgtgagttttcgttccactgagcgtcagaccccgtagaaaagatcaaaggatcttcttgagatcctttttttctgcgcgtaatctgctgcttgcaaacaaaaaaaccaccgctaccagcggtggtttgtttgccggatcaagagctaccaactctttttccgaaggtaactggcttcagcagagcgcagataccaaatactgttcttctagtgtagccgtagttaggccaccacttcaagaactctgtagcaccgcctacatacctcgctctgctaatcctgttaccagtggctgctgccagtggcgataagtcgtgtcttaccgggttggactcaagacgatagttaccggataaggcgcagcggtcgggctgaacggggggttcgtgcacacagcccagcttggagcgaacgacctacaccgaactgagatacctacagcgtgagctatgagaaagcgccacgcttcccgaagggagaaaggcggacaggtatccggtaagcggcagggtcggaacaggagagcgcacgagggagcttccagggggaaacgcctggtatctttatagtcctgtcgggtttcgccacctctgacttgagcgtcgatttttgtgatgctcgtcaggggggcggagcctatggaaaaacgccagcaacgcggcctttttacggttcctggccttttgctggccttttgctcacatgttctttcctgcgttatcccctgattctgtggataaccgtattaccgcctttgagtgagctgataccgctcgccgcagccgaacgaccgagcgcagcgagtcagtgagcgaggaagcggaagagcgcccaatacgcaaaccgcctctccccgcgcgttggccgattcattaatgcagctggcacgacaggtttcccgactggaaagcgggcagtgagcgcaacgcaattaatgtgagttagctcactcattaggcaccccaggctttacactttatgcttccggctcgtatgttgtgtggaattgtgagcggataacaatttcacacaggaaacagctatgaccatgattacgcctctagaaagctttaatacgactcactataaggactcactatttgttttcgcgcccagttgcaaaaagtgtcgacatttgcttctgacacaactgtgttcactagcaacctcaaacagacaccgccaccatggtccctgctgctaagagagtgaaactggatggatccgacaagaagtacagcatcggcctggccatcggcaccaactctgtgggctgggccgtgatcaccgacgagtacaaggtgcccagcaagaaattcaaggtgctgggcaacaccgaccggcacagcatcaagaagaacctgatcggcgccctgctgttcgacagcggagaaacagccgaggccacccggctgaagagaaccgccagaagaagatacaccagacggaagaaccggatctgctatctgcaagagatcttcagcaacgagatggccaaggtggacgacagcttcttccacagactggaagagtccttcctggtggaagaggataagaagcacgagcggcaccccatcttcggcaacatcgtggacgaggtggcctaccacgagaagtaccccaccatctaccacctgagaaagaaactggtggacagcaccgacaaggccgacctgcggctgatctatctggccctggcccacatgatcaagttccggggccacttcctgatcgagggcgacctgaaccccgacaacagcgacgtggacaagctgttcatccagctggtgcagacctacaaccagctgttcgaggaaaaccccatcaacgccagcggcgtggacgccaaggccatcctgtctgccagactgagcaagagcagacggctggaaaatctgatcgcccagctgcccggcgagaagaagaatggcctgttcggcaacctgattgccctgagcctgggcctgacccccaacttcaagagcaacttcgacctggccgaggatgccaaactgcagctgagcaaggacacctacgacgacgacctggacaacctgctggcccagatcggcgaccagtacgccgacctgtttctggccgccaagaacctgtccgacgccatcctgctgagcgacatcctgagagtgaacaccgagatcaccaaggcccccctgagcgcctctatgatcaagagatacgacgagcaccaccaggacctgaccctgctgaaagctctcgtgcggcagcagctgcctgagaagtacaaagagattttcttcgaccagagcaagaacggctacgccggctacatcgatggcggagccagccaggaagagttctacaagttcatcaagcccatcctggaaaagatggacggcaccgaggaactgctcgtgaagctgaacagagaggacctgctgcggaagcagcggaccttcgacaacggcagcatcccccaccagatccacctgggagagctgcacgccattctgcggcggcaggaagatttttacccattcctgaaggacaaccgggaaaagatcgagaagatcctgaccttccgcatcccctactacgtgggccctctggccaggggaaacagcagattcgcctggatgaccagaaagagcgaggaaaccatcaccccctggaacttcgaggaagtggtggacaagggcgccagcgcccagagcttcatcgagcggatgaccaacttcgataagaacctgcccaacgagaaggtgctgcccaagcacagcctgctgtacgagtacttcaccgtgtacaacgagctgaccaaagtgaaatacgtgaccgagggaatgagaaagcccgccttcctgagcggcgagcagaaaaaagccatcgtggacctgctgttcaagaccaaccggaaagtgaccgtgaagcagctgaaagaggactacttcaagaaaatcgagtgcttcgactccgtggaaatctccggcgtggaagatcggttcaacgcctccctgggcacataccacgatctgctgaaaattatcaaggacaaggacttcctggacaatgaggaaaacgaggacattctggaagatatcgtgctgaccctgacactgtttgaggacagagagatgatcgaggaacggctgaaaacctatgcccacctgttcgacgacaaagtgatgaagcagctgaagcggcggagatacaccggctggggcaggctgagccggaagctgatcaacggcatccgggacaagcagtccggcaagacaatcctggatttcctgaagtccgacggcttcgccaacagaaacttcatgcagctgatccacgacgacagcctgacctttaaagaggacatccagaaagcccaggtgtccggccagggcgatagcctgcacgagcacattgccaatctggccggcagccccgccattaagaagggcatcctgcagacagtgaaggtggtggacgagctcgtgaaagtgatgggccggcacaagcccgagaacatcgtgatcgaaatggccagagagaaccagaccacccagaagggacagaagaacagccgcgagagaatgaagcggatcgaagagggcatcaaagagctgggcagccagatcctgaaagaacaccccgtggaaaacacccagctgcagaacgagaagctgtacctgtactacctgcagaatgggcgggatatgtacgtggaccaggaactggacatcaaccggctgtccgactacgatgtggacgctatcgtgcctcagagctttctgaaggacgactccatcgataacaaagtgctgactcggagcgacaagaaccggggcaagagcgacaacgtgccctccgaagaggtcgtgaagaagatgaagaactactggcgccagctgctgaatgccaagctgattacccagaggaagttcgacaatctgaccaaggccgagagaggcggcctgagcgaactggataaggccggcttcatcaagagacagctggtggaaacccggcagatcacaaagcacgtggcacagatcctggactcccggatgaacactaagtacgacgagaacgacaaactgatccgggaagtgaaagtgatcaccctgaagtccaagctggtgtccgatttccggaaggatttccagttttacaaagtgcgcgagatcaacaactaccaccacgcccacgacgcctacctgaacgccgtcgtgggaaccgccctgatcaaaaagtaccctaagctggaaagcgagttcgtgtacggcgactacaaggtgtacgacgtgcggaagatgatcgccaagagcgagcaggaaatcggcaaggctaccgccaagtacttcttctacagcaacatcatgaactttttcaagaccgagattaccctggccaacggcgagatccggaagcggcctctgatcgagacaaacggcgaaacaggcgagatcgtgtgggataagggccgggactttgccaccgtgcggaaagtgctgtctatgccccaagtgaatatcgtgaaaaagaccgaggtgcagacaggcggcttcagcaaagagtctatcctgcccaagaggaacagcgacaagctgatcgccagaaagaaggactgggaccctaagaagtacggcggcttcgacagccccaccgtggcctattctgtgctggtggtggccaaagtggaaaagggcaagtccaagaaactgaagagtgtgaaagagctgctggggatcaccatcatggaaagaagcagcttcgagaagaatcccatcgactttctggaagccaagggctacaaagaagtgaaaaaggacctgatcatcaagctgcctaagtactccctgttcgagctggaaaacggccggaagagaatgctggcctctgccggcgaactgcagaagggaaacgaactggccctgccctccaaatatgtgaacttcctgtacctggccagccactatgagaagctgaagggctcccccgaggataatgagcagaaacagctgtttgtggaacagcacaaacactacctggacgagatcatcgagcagatcagcgagttctccaagagagtgatcctggccgacgctaatctggacaaggtgctgagcgcctacaacaagcacagagacaagcctatcagagagcaggccgagaatatcatccacctgtttaccctgaccaatctgggagcccctgccgccttcaagtactttgacaccaccatcgaccggaagaggtacaccagcaccaaagaggtgctggacgccaccctgatccaccagagcatcaccggcctgtacgagacacggatcgacctgtctcagctgggaggcgacgcctatccctatgacgtgcccgattatgccagcctgggcagcggctcccccaagaaaaaacgcaaggtggaagatcctaagaaaaagcggaaagtggacggcggagggccgagctctggcgcacccccaccaagtggagggtctcctgccgggtccccaacatctactgaagaaggcaccagcgaatccgcaacgcccgagtcaggccctggtacctccacagaaccatctgaaggtagtgcgcctggttccccagctggaagccctacttccaccgaagaaggcacgtcaaccgaaccaagtgaaggatctgcccctgggaccagcactgaaccatctgagatgggccctatggagatatacaagacagtgtctgcatggaagagacagccagtgcgggtactgagcctcttcagaaacatcgacaaggtactaaagagtttgggcttcttggaaagcggttctggttctgggggaggaacgctgaagtacgtggaagatgtcacaaatgtcgtgaggagagacgtggagaaatggggcccctttgacctggtgtacggctcgacgcagcccctaggcagctcttgtgatcgctgtcccggctggtacatgttccagttccaccggatcctgcagtatgcgctgcctcgccaggagagtcagcggcccttcttctggatattcatggacaatctgctgctgactgaggatgaccaagagacaactacccgcttccttcagacagaggctgtgaccctccaggatgtccgtggcagagactaccagaatgctatgcgggtgtggagcaacattccagggctgaagagcaagcatgcgcccctgaccccaaaggaagaagagtatctgcaagcccaagtcagaagcaggagcaagctggacgccccgaaagttgacctcctggtgaagaactgccttctcccgctgagagagtacttcaagtatttttctcaaaactcacttcctctttctagcggcaatagtaacgctaacagccgcgggccgagcttcagcagcggcctggtgccgttaagcttgcgcggcagccatatgaaccatgaccaggaatttgaccccccaaaggtttacccacctgtgccagctgagaagaggaagcccatccgcgtgctgtctctctttgatgggattgctacagggctcctggtgctgaaggacctgggcatccaagtggaccgctacattgcctccgaggtgtgtgaggactccatcacggtgggcatggtgcggcaccagggaaagatcatgtacgtcggggacgtccgcagcgtcacacagaagcatatccaggagtggggcccattcgacctggtgattggaggcagtccctgcaatgacctctccattgtcaaccctgcccgcaagggactttatgagggtactggccgcctcttctttgagttctaccgcctcctgcatgatgcgcggcccaaggagggagatgatcgccccttcttctggctctttgagaatgtggtggccatgggcgttagtgacaagagggacatctcgcgatttcttgagtctaaccccgtgatgattgacgccaaagaagtgtctgctgcacacagggcccgttacttctggggtaaccttcctggcatgaacaggcctttggcatccactgtgaatgataagctggagctgcaagagtgtctggagcacggcagaatagccaagttcagcaaagtgaggaccattaccaccaggtcaaactctataaagcagggcaaagaccagcatttccccgtcttcatgaacgagaaggaggacatcctgtggtgcactgaaatggaaagggtgtttggcttccccgtccactacacagacgtctccaacatgagccgcttggcgaggcagagactgctgggccgatcgtggagcgtgccggtcatccgccacctcttcgctccgctgaaggaatattttgcttgtgtggacggcagcggcagcgagacccccggtaccagcgagagcgccacccccgagagccggacactggtgaccttcaaggatgtatttgtggacttcaccagggaggagtggaagctgctggacactgctcagcagatcgtgtacagaaatgtgatgctggagaactataagaacctggtttccttgggttatcagcttactaagccagatgtgatcctccggttggagaagggagaagagccctgagatcccaagcacgcagcaatgcagctcaaaacgcttagcctagccacacccccacgggaaacagcagtgattaacctttagcaataaacgaaagtttaactaagctatactaaccccagggttggtcaatttcgtgccagccacaccctggtactgcatgcacgcaatgctagctgcccctttcccgtcctgggcaccccgagtctcccccgaccccgggtcccaggtatgctcccacctccacctgccccactcaccacctctgctagttccagacacctccgaagatggaaaaaaaaaaaaaaaaaaaaaaaaaaaaaaaaaaaaaaaaaaaaaaaaaaaaaaaaaaaaaaaaaaaaaaaaaaaaaaaaaaaaaaaaaaaaaaaaaaaaaaaaaaaaaaaaaaaaaaaaaaaaaaaaaaaaaaaaaaaaaaaaaaaaaaaaaaaaaaaaaaaaaaaaaaaaaaaaaaaaaaaaaaaaaaaaaaaaaaaaaaaaaaaaaaaaaaaaaaaaaaaaaaaaaaaaaaaaaaaaaaaaaaaaaaaaaaaaaaaaaaaaaaaaaaaaaaaaaaaaaaaaaaaaaaaaaaaaaaaaaaaaaaaaaaaaaaaaaaaaaaaaaaaaaaaaaaaaaaaaaaaaaaaaaaaaaaaaaaaaaaaaaaaaaaaaaaaaaaaaaaaaaaaaaaaaaaccgtcttcaagctttctagaaattcactggccgtcgttttacaacgtcgtgactgggaaaaccctggcgttacccaacttaatcgccttgcagcacatccccctttcgccagctggcgtaatagcgaagaggcccgcaccgatcgcccttcccaacagttgcgcagcctgaatggcgaatggcgcctgatgcggtattttctccttacgcatctgtgcggtatttcacaccgcatatggtgcactctcagtacaatctgctctgatgccgcatagttaagccagccccgacacccgccaacacccgctgacgcgccctgacgggcttgtctgctcccggcatccgcttacagacaagctgtgaccgtctccgggagctgcatgtgtcagaggttttcaccgtcatcaccgaaacgcgcgagacgaaagggcctcgtgatacgcctatttttataggttaatgtcatgataataatggtttcttagacgtcaggtggcacttttcggggaaatgtgcgcggaacccctatttgtttatttttctaaatacattcaaatatgtatccgctcatgagacaataaccctgataaatgcttcaataatattgaaaaaggaagagtatgagtattcaacatttccgtgtcgcccttattcccttttttgcggcattttgccttcctgtttttgctcacccagaaacgctggtgaaagtaaaagatgctgaagatcagttgggtgcacgagtgggttacatcgaactggatctcaacagcggtaagatccttgagagttttcgccccgaagaacgttttccaatgatgagcacttttaaagttctgctatgtggcgcggtattatcccgtattgacgccgggcaagagcaactcggtcgccgcatacactattctcagaatgacttggttgagtactcaccagtcacagaaaagcatcttacggatggcatgacagtaagagaattatgcagtgctgccataaccatgagtgataacactgcggccaacttacttctgacaacgatcggaggaccgaaggagctaaccgcttttttgcacaacatgggggatcatgtaactcgccttgatcgttgggaaccggagctgaatgaagccataccaaacgacgagcgtgacaccacgatgcctgtagcaatggcaacaacgttgcgcaaactattaactggcgaactacttactctagcttcccggcaacaattaatagactggatggaggcggataaagttgcaggaccacttctgcgctcggcccttccggctggctggtttattgctgataaatctggagccggtgagcgtgggtcacgcggtatcattgcagcactggggccagatggtaagccctcccgtatcgtagttatctacacgacggggagtcaggcaactatggatgaacgaaatagacagatcgctgagataggtgcctcactgattaagcattggtaactgtcagaccaagtttactcatatatactttagattgatttaaaacttcatttttaatttaaaaggatctaggtgaagatcctttttgataatctcatgaccaaaatc

SEQ ID NO: 144 - DNA, 10053 bp, synthetic construct
  misc_feature 1..10053: note = V26 DNA
  source 1..10053: mol_type = other DNA
tgtgaccgtctccgggagctgcatgtgtcagaggttttcaccgtcatcaccgaaacgcgcgagacgaaagggcctcgtgatacgcctatttttataggttaatgtcatgataataatggtttcttagacgtcaggtggcacttttcggggaaatgtgcgcggaacccctatttgtttatttttctaaatacattcaaatatgtatccgctcatgagacaataaccctgataaatgcttcaataatattgaaaaaggaagagtatgagtattcaacatttccgtgtcgcccttattcccttttttgcggcattttgccttcctgtttttgctcacccagaaacgctggtgaaagtaaaagatgctgaagatcagttgggtgcacgagtgggttacatcgaactggatctcaacagcggtaagatccttgagagttttcgccccgaagaacgttttccaatgatgagcacttttaaagttctgctatgtggcgcggtattatcccgtattgacgccgggcaagagcaactcggtcgccgcatacactattctcagaatgacttggttgagtactcaccagtcacagaaaagcatcttacggatggcatgacagtaagagaattatgcagtgctgccataaccatgagtgataacactgcggccaacttacttctgacaacgatcggaggaccgaaggagctaaccgcttttttgcacaacatgggggatcatgtaactcgccttgatcgttgggaaccggagctgaatgaagccataccaaacgacgagcgtgacaccacgatgcctgtagcaatggcaacaacgttgcgcaaactattaactggcgaactacttactctagcttcccggcaacaattaatagactggatggaggcggataaagttgcaggaccacttctgcgctcggcccttccggctggctggtttattgctgataaatctggagccggtgagcgtgggtcacgcggtatcattgcagcactggggccagatggtaagccctcccgtatcgtagttatctacacgacggggagtcaggcaactatggatgaacgaaatagacagatcgctgagataggtgcctcactgattaagcattggtaactgtcagaccaagtttactcatatatactttagattgatttaaaacttcatttttaatttaaaaggatctaggtgaagatcctttttgataatctcatgaccaaaatcccttaacgtgagttttcgttccactgagcgtcagaccccgtagaaaagatcaaaggatcttcttgagatcctttttttctgcgcgtaatctgctgcttgcaaacaaaaaaaccaccgctaccagcggtggtttgtttgccggatcaagagctaccaactctttttccgaaggtaactggcttcagcagagcgcagataccaaatactgttcttctagtgtagccgtagttaggccaccacttcaagaactctgtagcaccgcctacatacctcgctctgctaatcctgttaccagtggctgctgccagtggcgataagtcgtgtcttaccgggttggactcaagacgatagttaccggataaggcgcagcggtcgggctgaacggggggttcgtgcacacagcccagcttggagcgaacgacctacaccgaactgagatacctacagcgtgagctatgagaaagcgccacgcttcccgaagggagaaaggcggacaggtatccggtaagcggcagggtcggaacaggagagcgcacgagggagcttccagggggaaacgcctggtatctttatagtcctgtcgggtttcgccacctctgacttgagcgtcgatttttgtgatgctcgtcaggggggcggagcctatggaaaaacgccagcaacgcggcctttttacggttcctggccttttgctggccttttgctcacatgttctttcctgcgttatcccctgattctgtggataaccgtattaccgcctttgagtgagctgataccgctcgccgcagccgaacgaccgagcgcagcgagtcagtgagcgaggaagcggaagagcgcccaatacgcaaaccgcctctccccgcgcgttggccgattcattaatgcagctggcacgacaggtttcccgactggaaagcgggcagtgagcgcaacgcaattaatgtgagttagctcactcattaggcaccccaggctttacactttatgcttccggctcgtatgttgtgtggaattgtgagcggataacaatttcacacaggaaacagctatgaccatgattacgcctctagaaagctttaatacgactcactataaggactcactatttgttttcgcgcccagttgcaaaaagtgtcgacatttgcttctgacacaactgtgttcactagcaacctcaaacagacaccgccaccatggtccctgctgctaagagagtgaaactggatggatccgacaagaagtacagcatcggcctggccatcggcaccaactctgtgggctgggccgtgatcaccgacgagtacaaggtgcccagcaagaaattcaaggtgctgggcaacaccgaccggcacagcatcaagaagaacctgatcggcgccctgctgttcgacagcggagaaacagccgaggccacccggctgaagagaaccgccagaagaagatacaccagacggaagaaccggatctgctatctgcaagagatcttcagcaacgagatggccaaggtggacgacagcttcttccacagactggaagagtccttcctggtggaagaggataagaagcacgagcggcaccccatcttcggcaacatcgtggacgaggtggcctaccacgagaagtaccccaccatctaccacctgagaaagaaactggtggacagcaccgacaaggccgacctgcggctgatctatctggccctggcccacatgatcaagttccggggccacttcctgatcgagggcgacctgaaccccgacaacagcgacgtggacaagctgttcatccagctggtgcagacctacaaccagctgttcgaggaaaaccccatcaacgccagcggcgtggacgccaaggccatcctgtctgccagactgagcaagagcagacggctggaaaatctgatcgcccagctgcccggcgagaagaagaatggcctgttcggcaacctgattgccctgagcctgggcctgacccccaacttcaagagcaacttcgacctggccgaggatgccaaactgcagctgagcaaggacacctacgacgacgacctggacaacctgctggcccagatcggcgaccagtacgccgacctgtttctggccgccaagaacctgtccgacgccatcctgctgagcgacatcctgagagtgaacaccgagatcaccaaggcccccctgagcgcctctatgatcaagagatacgacgagcaccaccaggacctgaccctgctgaaagctctcgtgcggcagcagctgcctgagaagtacaaagagattttcttcgaccagagcaagaacggctacgccggctacatcgatggcggagccagccaggaagagttctacaagttcatcaagcccatcctggaaaagatggacggcaccgaggaactgctcgtgaagctgaacagagaggacctgctgcggaagcagcggaccttcgacaacggcagcatcccccaccagatccacctgggagagctgcacgccattctgcggcggcaggaagatttttacccattcctgaaggacaaccgggaaaagatcgagaagatcctgaccttccgcatcccctactacgtgggccctctggccaggggaaacagcagattcgcctggatgaccagaaagagcgaggaaaccatcaccccctggaacttcgaggaagtggtggacaagggcgccagcgcccagagcttcatcgagcggatgaccaacttcgataagaacctgcccaacgagaaggtgctgcccaagcacagcctgctgtacgagtacttcaccgtgtacaacgagctgaccaaagtgaaatacgtgaccgagggaatgagaaagcccgccttcctgagcggcgagcagaaaaaagccatcgtggacctgctgttcaagaccaaccggaaagtgaccgtgaagcagctgaaagaggactacttcaagaaaatcgagtgcttcgactccgtggaaatctccggcgtggaagatcggttcaacgcctccctgggcacataccacgatctgctgaaaattatcaaggacaaggacttcctggacaatgaggaaaacgaggacattctggaagatatcgtgctgaccctgacactgtttgaggacagagagatgatcgaggaacggctgaaaacctatgcccacctgttcgacgacaaagtgatgaagcagctgaagcggcggagatacaccggctggggcaggctgagccggaagctgatcaacggcatccgggacaagcagtccggcaagacaatcctggatttcctgaagtccgacggcttcgccaacagaaacttcatgcagctgatccacgacgacagcctgacctttaaagaggacatccagaaagcccaggtgtccggccagggcgatagcctgcacgagcacattgccaatctggccggcagccccgccattaagaagggcatcctgcagacagtgaaggtggtggacgagctcgtgaaagtgatgggccggcacaagcccgagaacatcgtgatcgaaatggccagagagaaccagaccacccagaagggacagaagaacagccgcgagagaatgaagcggatcgaagagggcatcaaagagctgggcagccagatcctgaaagaacaccccgtggaaaacacccagctgcagaacgagaagctgtacctgtactacctgcagaatgggcgggatatgtacgtggaccaggaactggacatcaaccggctgtccgactacgatgtggacgctatcgtgcctcagagctttctgaaggacgactccatcgataacaaagtgctgactcggagcgacaagaaccggggcaagagcgacaacgtgccctccgaagaggtcgtgaagaagatgaagaactactggcgccagctgctgaatgccaagctgattacccagaggaagttcgacaatctgaccaaggccgagagaggcggcctgagcgaactggataaggccggcttcatcaagagacagctggtggaaacccggcagatcacaaagcacgtggcacagatcctggactcccggatgaacactaagtacgacgagaacgacaaactgatccgggaagtgaaagtgatcaccctgaagtccaagctggtgtccgatttccggaaggatttccagttttacaaagtgcgcgagatcaacaactaccaccacgcccacgacgcctacctgaacgccgtcgtgggaaccgccctgatcaaaaagtaccctaagctggaaagcgagttcgtgtacggcgactacaaggtgtacgacgtgcggaagatgatcgccaagagcgagcaggaaatcggcaaggctaccgccaagtacttcttctacagcaacatcatgaactttttcaagaccgagattaccctggccaacggcgagatccggaagcggcctctgatcgagacaaacggcgaaacaggcgagatcgtgtgggataagggccgggactttgccaccgtgcggaaagtgctgtctatgccccaagtgaatatcgtgaaaaagaccgaggtgcagacaggcggcttcagcaaagagtctatcctgcccaagaggaacagcgacaagctgatcgccagaaagaaggactgggaccctaagaagtacggcggcttcgacagccccaccgtggcctattctgtgctggtggtggccaaagtggaaaagggcaagtccaagaaactgaagagtgtgaaagagctgctggggatcaccatcatggaaagaagcagcttcgagaagaatcccatcgactttctggaagccaagggctacaaagaagtgaaaaaggacctgatcatcaagctgcctaagtactccctgttcgagctggaaaacggccggaagagaatgctggcctctgccggcgaactgcagaagggaaacgaactggccctgccctccaaatatgtgaacttcctgtacctggccagccactatgagaagctgaagggctcccccgaggataatgagcagaaacagctgtttgtggaacagcacaaacactacctggacgagatcatcgagcagatcagcgagttctccaagagagtgatcctggccgacgctaatctggacaaggtgctgagcgcctacaacaagcacagagacaagcctatcagagagcaggccgagaatatcatccacctgtttaccctgaccaatctgggagcccctgccgccttcaagtactttgacaccaccatcgaccggaagaggtacaccagcaccaaagaggtgctggacgccaccctgatccaccagagcatcaccggcctgtacgagacacggatcgacctgtctcagctgggaggcgacgcctatccctatgacgtgcccgattatgccagcctgggcagcggctcccccaagaaaaaacgcaaggtggaagatcctaagaaaaagcggaaagtggacggcggagggccgagctctggcgcacccccaccaagtggagggtctcctgccgggtccccaacatctactgaagaaggcaccagcgaatccgcaacgcccgagtcaggccctggtacctccacagaaccatctgaaggtagtgcgcctggttccccagctggaagccctacttccaccgaagaaggcacgtcaaccgaaccaagtgaaggatctgcccctgggaccagcactgaaccatctgagcggacactggtgaccttcaaggatgtatttgtggacttcaccagggaggagtggaagctgctggacactgctcagcagatcgtgtacagaaatgtgatgctggagaactataagaacctggtttccttgggttatcagcttactaagccagatgtgatcctccggttggagaagggagaagagcccagcggcagcgagacccccggtaccagcgagagcgctacacccgaatccggccccggcagccccgccggcagccctacaagcaccgaggagggcacctccgaatccgccacccctgagagcggacccggcagcgagcctgccacaagcggcagcgagacacctggaacaagcgagagcgccacacctgaaagcggccccggaacatccaccgagcctagcgagggcagcgcccctggcacaagcacagagccttccgagagcgccacccccgagagcatgggccctatggagatatacaagacagtgtctgcatggaagagacagccagtgcgggtactgagcctcttcagaaacatcgacaaggtactaaagagtttgggcttcttggaaagcggttctggttctgggggaggaacgctgaagtacgtggaagatgtcacaaatgtcgtgaggagagacgtggagaaatggggcccctttgacctggtgtacggctcgacgcagcccctaggcagctcttgtgatcgctgtcccggctggtacatgttccagttccaccggatcctgcagtatgcgctgcctcgccaggagagtcagcggcccttcttctggatattcatggacaatctgctgctgactgaggatgaccaagagacaactacccgcttccttcagacagaggctgtgaccctccaggatgtccgtggcagagactaccagaatgctatgcgggtgtggagcaacattccagggctgaagagcaagcatgcgcccctgaccccaaaggaagaagagtatctgcaagcccaagtcagaagcaggagcaagctggacgccccgaaagttgacctcctggtgaagaactgccttctcccgctgagagagtacttcaagtatttttctcaaaactcacttcctctttctagcggcaatagtaacgctaacagccgcgggccgagcttcagcagcggcctggtgccgttaagcttgcgcggcagccatatgaaccatgaccaggaatttgaccccccaaaggtttacccacctgtgccagctgagaagaggaagcccatccgcgtgctgtctctctttgatgggattgctacagggctcctggtgctgaaggacctgggcatccaagtggaccgctacattgcctccgaggtgtgtgaggactccatcacggtgggcatggtgcggcaccagggaaagatcatgtacgtcggggacgtccgcagcgtcacacagaagcatatccaggagtggggcccattcgacctggtgattggaggcagtccctgcaatgacctctccattgtcaaccctgcccgcaagggactttatgagggtactggccgcctcttctttgagttctaccgcctcctgcatgatgcgcggcccaaggagggagatgatcgccccttcttctggctctttgagaatgtggtggccatgggcgttagtgacaagagggacatctcgcgatttcttgagtctaaccccgtgatgattgacgccaaagaagtgtctgctgcacacagggcccgttacttctggggtaaccttcctggcatgaacaggcctttggcatccactgtgaatgataagctggagctgcaagagtgtctggagcacggcagaatagccaagttcagcaaagtgaggaccattaccaccaggtcaaactctataaagcagggcaaagaccagcatttccccgtcttcatgaacgagaaggaggacatcctgtggtgcactgaaatggaaagggtgtttggcttccccgtccactacacagacgtctccaacatgagccgcttggcgaggcagagactgctgggccgatcgtggagcgtgccggtcatccgccacctcttcgctccgctgaaggaatattttgcttgtgtgtgataatagggatcccaagcacgcagcaatgcagctcaaaacgcttagcctagccacacccccacgggaaacagcagtgattaacctttagcaataaacgaaagtttaactaagctatactaaccccagggttggtcaatttcgtgccagccacaccctggtactgcatgcacgcaatgctagctgcccctttcccgtcctgggcaccccgagtctcccccgaccccgggtcccaggtatgctcccacctccacctgccccactcaccacctctgctagttccagacacctccgaagatggaaaaaaaaaaaaaaaaaaaaaaaaaaaaaaaaaaaaaaaaaaaaaaaaaaaaaaaaaaaaaaaaaaaaaaaaaaaaaaaaaaaaaaaaaaaaaaaaaaaaaaaaaaaaaaaaaaaaaaaaaaaaaaaaaaaaaaaaaaaaaaaaaaaaaaaaaaaaaaaaaaaaaaaaaaaaaaaaaaaaaaaaaaaaaaaaaaaaaaaaaaaaaaaaaaaaaaaaaaaaaaaaaaaaaaaaaaaaaaaaaaaaaaaaaaaaaaaaaaaaaaaaaaaaaaaaaaaaaaaaaaaaaaaaaaaaaaaaaaaaaaaaaaaaaaaaaaaaaaaaaaaaaaaaaaaaaaaaaaaaaaaaaaaaaaaaaaaaaaaaaaaaaaaaaaaaaaaaaaaaaaaaaaaaaaaaaaccgtcttcaagctttctagaaattcactggccgtcgttttacaacgtcgtgactgggaaaaccctggcgttacccaacttaatcgccttgcagcacatccccctttcgccagctggcgtaatagcgaagaggcccgcaccgatcgcccttcccaacagttgcgcagcctgaatggcgaatggcgcctgatgcggtattttctccttacgcatctgtgcggtatttcacaccgcatatggtgcactctcagtacaatctgctctgatgccgcatagttaagccagccccgacacccgccaacacccgctgacgcgccctgacgggcttgtctgctcccggcatccgcttacagacaagc

SEQ ID NO: 145 - DNA, 10053 bp, synthetic construct
  misc_feature 1..10053: note = V27 DNA
  source 1..10053: mol_type = other DNA
tgtgaccgtctccgggagctgcatgtgtcagaggttttcaccgtcatcaccgaaacgcgcgagacgaaagggcctcgtgatacgcctatttttataggttaatgtcatgataataatggtttcttagacgtcaggtggcacttttcggggaaatgtgcgcggaacccctatttgtttatttttctaaatacattcaaatatgtatccgctcatgagacaataaccctgataaatgcttcaataatattgaaaaaggaagagtatgagtattcaacatttccgtgtcgcccttattcccttttttgcggcattttgccttcctgtttttgctcacccagaaacgctggtgaaagtaaaagatgctgaagatcagttgggtgcacgagtgggttacatcgaactggatctcaacagcggtaagatccttgagagttttcgccccgaagaacgttttccaatgatgagcacttttaaagttctgctatgtggcgcggtattatcccgtattgacgccgggcaagagcaactcggtcgccgcatacactattctcagaatgacttggttgagtactcaccagtcacagaaaagcatcttacggatggcatgacagtaagagaattatgcagtgctgccataaccatgagtgataacactgcggccaacttacttctgacaacgatcggaggaccgaaggagctaaccgcttttttgcacaacatgggggatcatgtaactcgccttgatcgttgggaaccggagctgaatgaagccataccaaacgacgagcgtgacaccacgatgcctgtagcaatggcaacaacgttgcgcaaactattaactggcgaactacttactctagcttcccggcaacaattaatagactggatggaggcggataaagttgcaggaccacttctgcgctcggcccttccggctggctggtttattgctgataaatctggagccggtgagcgtgggtcacgcggtatcattgcagcactggggccagatggtaagccctcccgtatcgtagttatctacacgacggggagtcaggcaactatggatgaacgaaatagacagatcgctgagataggtgcctcactgattaagcattggtaactgtcagaccaagtttactcatatatactttagattgatttaaaacttcatttttaatttaaaaggatctaggtgaagatcctttttgataatctcatgaccaaaatcccttaacgtgagttttcgttccactgagcgtcagaccccgtagaaaagatcaaaggatcttcttgagatcctttttttctgcgcgtaatctgctgcttgcaaacaaaaaaaccaccgctaccagcggtggtttgtttgccggatcaagagctaccaactctttttccgaaggtaactggcttcagcagagcgcagataccaaatactgttcttctagtgtagccgtagttaggccaccacttcaagaactctgtagcaccgcctacatacctcgctctgctaatcctgttaccagtggctgctgccagtggcgataagtcgtgtcttaccgggttggactcaagacgatagttaccggataaggcgcagcggtcgggctgaacggggggttcgtgcacacagcccagcttggagcgaacgacctacaccgaactgagatacctacagcgtgagctatgagaaagcgccacgcttcccgaagggagaaaggcggacaggtatccggtaagcggcagggtcggaacaggagagcgcacgagggagcttccagggggaaacgcctggtatctttatagtcctgtcgggtttcgccacctctgacttgagcgtcgatttttgtgatgctcgtcaggggggcggagcctatggaaaaacgccagcaacgcggcctttttacggttcctggccttttgctggccttttgctcacatgttctttcctgcgttatcccctgattctgtggataaccgtattaccgcctttgagtgagctgataccgctcgccgcagccgaacgaccgagcgcagcgagtcagtgagcgaggaagcggaagagcgcccaatacgcaaaccgcctctccccgcgcgttggccgattcattaatgcagctggcacgacaggtttcccgactggaaagcgggcagtgagcgcaacgcaattaatgtgagttagctcactcattaggcaccccaggctttacactttatgcttccggctcgtatgttgtgtggaattgtgagcggataacaatttcacacaggaaacagctatgaccatgattacgcctctagaaagctttaatacgactcactataaggactcactatttgttttcgcgcccagttgcaaaaagtgtcgacatttgcttctgacacaactgtgttcactagcaacctcaaacagacaccgccaccatggtccctgctgctaagagagtgaaactggatggatccgacaagaagtacagcatcggcctggccatcggcaccaactctgtgggctgggccgtgatcaccgacgagtacaaggtgcccagcaagaaattcaaggtgctgggcaacaccgaccggcacagcatcaagaagaacctgatcggcgccctgctgttcgacagcggagaaacagccgaggccacccggctgaagagaaccgccagaagaagatacaccagacggaagaaccggatctgctatctgcaagagatcttcagcaacgagatggccaaggtggacgacagcttcttccacagactggaagagtccttcctggtggaagaggataagaagcacgagcggcaccccatcttcggcaacatcgtggacgaggtggcctaccacgagaagtaccccaccatctaccacctgagaaagaaactggtggacagcaccgacaaggccgacctgcggctgatctatctggccctggcccacatgatcaagttccggggccacttcctgatcgagggcgacctgaaccccgacaacagcgacgtggacaagctgttcatccagctggtgcagacctacaaccagctgttcgaggaaaaccccatcaacgccagcggcgtggacgccaaggccatcctgtctgccagactgagcaagagcagacggctggaaaatctgatcgcccagctgcccggcgagaagaagaatggcctgttcggcaacctgattgccctgagcctgggcctgacccccaacttcaagagcaacttcgacctggccgaggatgccaaactgcagctgagcaaggacacctacgacgacgacctggacaacctgctggcccagatcggcgaccagtacgccgacctgtttctggccgccaagaacctgtccgacgccatcctgctgagcgacatcctgagagtgaacaccgagatcaccaaggcccccctgagcgcctctatgatcaagagatacgacgagcaccaccaggacctgaccctgctgaaagctctcgtgcggcagcagctgcctgagaagtacaaagagattttcttcgaccagagcaagaacggctacgccggctacatcgatggcggagccagccaggaagagttctacaagttcatcaagcccatcctggaaaagatggacggcaccgaggaactgctcgtgaagctgaacagagaggacctgctgcggaagcagcggaccttcgacaacggcagcatcccccaccagatccacctgggagagctgcacgccattctgcggcggcaggaagatttttacccattcctgaaggacaaccgggaaaagatcgagaagatcctgaccttccgcatcccctactacgtgggccctctggccaggggaaacagcagattcgcctggatgaccagaaagagcgaggaaaccatcaccccctggaacttcgaggaagtggtggacaagggcgccagcgcccagagcttcatcgagcggatgaccaacttcgataagaacctgcccaacgagaaggtgctgcccaagcacagcctgctgtacgagtacttcaccgtgtacaacgagctgaccaaagtgaaatacgtgaccgagggaatgagaaagcccgccttcctgagcggcgagcagaaaaaagccatcgtggacctgctgttcaagaccaaccggaaagtgaccgtgaagcagctgaaagaggactacttcaagaaaatcgagtgcttcgactccgtggaaatctccggcgtggaagatcggttcaacgcctccctgggcacataccacgatctgctgaaaattatcaaggacaaggacttcctggacaatgaggaaaacgaggacattctggaagatatcgtgctgaccctgacactgtttgaggacagagagatgatcgaggaacggctgaaaacctatgcccacctgttcgacgacaaagtgatgaagcagctgaagcggcggagatacaccggctggggcaggctgagccggaagctgatcaacggcatccgggacaagcagtccggcaagacaatcctggatttcctgaagtccgacggcttcgccaacagaaacttcatgcagctgatccacgacgacagcctgacctttaaagaggacatccagaaagcccaggtgtccggccagggcgatagcctgcacgagcacattgccaatctggccggcagccccgccattaagaagggcatcctgcagacagtgaaggtggtggacgagctcgtgaaagtgatgggccggcacaagcccgagaacatcgtgatcgaaatggccagagagaaccagaccacccagaagggacagaagaacagccgcgagagaatgaagcggatcgaagagggcatcaaagagctgggcagccagatcctgaaagaacaccccgtggaaaacacccagctgcagaacgagaagctgtacctgtactacctgcagaatgggcgggatatgtacgtggaccaggaactggacatcaaccggctgtccgactacgatgtggacgctatcgtgcctcagagctttctgaaggacgactccatcgataacaaagtgctgactcggagcgacaagaaccggggcaagagcgacaacgtgccctccgaagaggtcgtgaagaagatgaagaactactggcgccagctgctgaatgccaagctgattacccagaggaagttcgacaatctgaccaaggccgagagaggcggcctgagcgaactggataaggccggcttcatcaagagacagctggtggaaacccggcagatcacaaagcacgtggcacagatcctggactcccggatgaacactaagtacgacgagaacgacaaactgatccgggaagtgaaagtgatcaccctgaagtccaagctggtgtccgatttccggaaggatttccagttttacaaagtgcgcgagatcaacaactaccaccacgcccacgacgcctacctgaacgccgtcgtgggaaccgccctgatcaaaaagtaccctaagctggaaagcgagttcgtgtacggcgactacaaggtgtacgacgtgcggaagatgatcgccaagagcgagcaggaaatcggcaaggctaccgccaagtacttcttctacagcaacatcatgaactttttcaagaccgagattaccctggccaacggcgagatccggaagcggcctctgatcgagacaaacggcgaaacaggcgagatcgtgtgggataagggccgggactttgccaccgtgcggaaagtgctgtctatgccccaagtgaatatcgtgaaaaagaccgaggtgcagacaggcggcttcagcaaagagtctatcctgcccaagaggaacagcgacaagctgatcgccagaaagaaggactgggaccctaagaagtacggcggcttcgacagccccaccgtggcctattctgtgctggtggtggccaaagtggaaaagggcaagtccaagaaactgaagagtgtgaaagagctgctggggatcaccatcatggaaagaagcagcttcgagaagaatcccatcgactttctggaagccaagggctacaaagaagtgaaaaaggacctgatcatcaagctgcctaagtactccctgttcgagctggaaaacggccggaagagaatgctggcctctgccggcgaactgcagaagggaaacgaactggccctgccctccaaatatgtgaacttcctgtacctggccagccactatgagaagctgaagggctcccccgaggataatgagcagaaacagctgtttgtggaacagcacaaacactacctggacgagatcatcgagcagatcagcgagttctccaagagagtgatcctggccgacgctaatctggacaaggtgctgagcgcctacaacaagcacagagacaagcctatcagagagcaggccgagaatatcatccacctgtttaccctgaccaatctgggagcccctgccgccttcaagtactttgacaccaccatcgaccggaagaggtacaccagcaccaaagaggtgctggacgccaccctgatccaccagagcatcaccggcctgtacgagacacggatcgacctgtctcagctgggaggcgacgcctatccctatgacgtgcccgattatgccagcctgggcagcggctcccccaagaaaaaacgcaaggtggaagatcctaagaaaaagcggaaagtggacggcggagggccgagctctggcgcacccccaccaagtggagggtctcctgccgggtccccaacatctactgaagaaggcaccagcgaatccgcaacgcccgagtcaggccctggtacctccacagaaccatctgaaggtagtgcgcctggttccccagctggaagccctacttccaccgaagaaggcacgtcaaccgaaccaagtgaaggatctgcccctgggaccagcactgaaccatctgagcggacactggtgaccttcaaggatgtatttgtggacttcaccagggaggagtggaagctgctggacactgctcagcagatcgtgtacagaaatgtgatgctggagaactataagaacctggtttccttgggttatcagcttactaagccagatgtgatcctccggttggagaagggagaagagcccagcggcagcgagacccccggtaccagcgagagcgctacacccgaatccggccccggcagccccgccggcagccctacaagcaccgaggagggcacctccgaatccgccacccctgagagcggacccggcagcgagcctgccacaagcggcagcgagacacctggaacaagcgagagcgccacacctgaaagcggccccggaacatccaccgagcctagcgagggcagcgcccctggcacaagcacagagccttccgagagcgccacccccgagagcatgaaccatgaccaggaatttgaccccccaaaggtttacccacctgtgccagctgagaagaggaagcccatccgcgtgctgtctctctttgatgggattgctacagggctcctggtgctgaaggacctgggcatccaagtggaccgctacattgcctccgaggtgtgtgaggactccatcacggtgggcatggtgcggcaccagggaaagatcatgtacgtcggggacgtccgcagcgtcacacagaagcatatccaggagtggggcccattcgacctggtgattggaggcagtccctgcaatgacctctccattgtcaaccctgcccgcaagggactttatgagggtactggccgcctcttctttgagttctaccgcctcctgcatgatgcgcggcccaaggagggagatgatcgccccttcttctggctctttgagaatgtggtggccatgggcgttagtgacaagagggacatctcgcgatttcttgagtctaaccccgtgatgattgacgccaaagaagtgtctgctgcacacagggcccgttacttctggggtaaccttcctggcatgaacaggcctttggcatccactgtgaatgataagctggagctgcaagagtgtctggagcacggcagaatagccaagttcagcaaagtgaggaccattaccaccaggtcaaactctataaagcagggcaaagaccagcatttccccgtcttcatgaacgagaaggaggacatcctgtggtgcactgaaatggaaagggtgtttggcttccccgtccactacacagacgtctccaacatgagccgcttggcgaggcagagactgctgggccgatcgtggagcgtgccggtcatccgccacctcttcgctccgctgaaggaatattttgcttgtgtgtctagcggcaatagtaacgctaacagccgcgggccgagcttcagcagcggcctggtgccgttaagcttgcgcggcagccatatgggccctatggagatatacaagacagtgtctgcatggaagagacagccagtgcgggtactgagcctcttcagaaacatcgacaaggtactaaagagtttgggcttcttggaaagcggttctggttctgggggaggaacgctgaagtacgtggaagatgtcacaaatgtcgtgaggagagacgtggagaaatggggcccctttgacctggtgtacggctcgacgcagcccctaggcagctcttgtgatcgctgtcccggctggtacatgttccagttccaccggatcctgcagtatgcgctgcctcgccaggagagtcagcggcccttcttctggatattcatggacaatctgctgctgactgaggatgaccaagagacaactacccgcttccttcagacagaggctgtgaccctccaggatgtccgtggcagagactaccagaatgctatgcgggtgtggagcaacattccagggctgaagagcaagcatgcgcccctgaccccaaaggaagaagagtatctgcaagcccaagtcagaagcaggagcaagctggacgccccgaaagttgacctcctggtgaagaactgccttctcccgctgagagagtacttcaagtatttttctcaaaactcacttcctctttgataatagggatcccaagcacgcagcaatgcagctcaaaacgcttagcctagccacacccccacgggaaacagcagtgattaacctttagcaataaacgaaagtttaactaagctatactaaccccagggttggtcaatttcgtgccagccacaccctggtactgcatgcacgcaatgctagctgcccctttcccgtcctgggcaccccgagtctcccccgaccccgggtcccaggtatgctcccacctccacctgccccactcaccacctctgctagttccagacacctccgaagatggaaaaaaaaaaaaaaaaaaaaaaaaaaaaaaaaaaaaaaaaaaaaaaaaaaaaaaaaaaaaaaaaaaaaaaaaaaaaaaaaaaaaaaaaaaaaaaaaaaaaaaaaaaaaaaaaaaaaaaaaaaaaaaaaaaaaaaaaaaaaaaaaaaaaaaaaaaaaaaaaaaaaaaaaaaaaaaaaaaaaaaaaaaaaaaaaaaaaaaaaaaaaaaaaaaaaaaaaaaaaaaaaaaaaaaaaaaaaaaaaaaaaaaaaaaaaaaaaaaaaaaaaaaaaaaaaaaaaaaaaaaaaaaaaaaaaaaaaaaaaaaaaaaaaaaaaaaaaaaaaaaaaaaaaaaaaaaaaaaaaaaaaaaaaaaaaaaaaaaaaaaaaaaaaaaaaaaaaaaaaaaaaaaaaaaaaaaccgtcttcaagctttctagaaattcactggccgtcgttttacaacgtcgtgactgggaaaaccctggcgttacccaacttaatcgccttgcagcacatccccctttcgccagctggcgtaatagcgaagaggcccgcaccgatcgcccttcccaacagttgcgcagcctgaatggcgaatggcgcctgatgcggtattttctccttacgcatctgtgcggtatttcacaccgcatatggtgcactctcagtacaatctgctctgatgccgcatagttaagccagccccgacacccgccaacacccgctgacgcgccctgacgggcttgtctgctcccggcatccgcttacagacaagc

SEQ ID NO: 146 - DNA, 10112 bp, synthetic construct
  misc_feature 1..10112: note = V28 DNA
  source 1..10112: mol_type = other DNA
attaagccaccatgccaaaaaagaagagaaaggtaatggacaagaagtacagcatcggcctggccatcggcaccaactctgtgggctgggccgtgatcaccgacgagtacaaggtgcccagcaagaaattcaaggtgctgggcaacaccgaccggcacagcatcaagaagaacctgatcggcgccctgctgttcgacagcggagaaacagccgaggccacccggctgaagagaaccgccagaagaagatacaccagacggaagaaccggatctgctatctgcaagagatcttcagcaacgagatggccaaggtggacgacagcttcttccacagactggaagagtccttcctggtggaagaggataagaagcacgagcggcaccccatcttcggcaacatcgtggacgaggtggcctaccacgagaagtaccccaccatctaccacctgagaaagaaactggtggacagcaccgacaaggccgacctgcggctgatctatctggccctggcccacatgatcaagttccggggccacttcctgatcgagggcgacctgaaccccgacaacagcgacgtggacaagctgttcatccagctggtgcagacctacaaccagctgttcgaggaaaaccccatcaacgccagcggcgtggacgccaaggccatcctgtctgccagactgagcaagagcagacggctggaaaatctgatcgcccagctgcccggcgagaagaagaatggcctgttcggcaacctgattgccctgagcctgggcctgacccccaacttcaagagcaacttcgacctggccgaggatgccaaactgcagctgagcaaggacacctacgacgacgacctggacaacctgctggcccagatcggcgaccagtacgccgacctgtttctggccgccaagaacctgtccgacgccatcctgctgagcgacatcctgagagtgaacaccgagatcaccaaggcccccctgagcgcctctatgatcaagagatacgacgagcaccaccaggacctgaccctgctgaaagctctcgtgcggcagcagctgcctgagaagtacaaagagattttcttcgaccagagcaagaacggctacgccggctacatcgatggcggagccagccaggaagagttctacaagttcatcaagcccatcctggaaaagatggacggcaccgaggaactgctcgtgaagctgaacagagaggacctgctgcggaagcagcggaccttcgacaacggcagcatcccccaccagatccacctgggagagctgcacgccattctgcggcggcaggaagatttttacccattcctgaaggacaaccgggaaaagatcgagaagatcctgaccttccgcatcccctactacgtgggccctctggccaggggaaacagcagattcgcctggatgaccagaaagagcgaggaaaccatcaccccctggaacttcgaggaagtggtggacaagggcgccagcgcccagagcttcatcgagcggatgaccaacttcgataagaacctgcccaacgagaaggtgctgcccaagcacagcctgctgtacgagtacttcaccgtgtacaacgagctgaccaaagtgaaatacgtgaccgagggaatgagaaagcccgccttcctgagcggcgagcagaaaaaagccatcgtggacctgctgttcaagaccaaccggaaagtgaccgtgaagcagctgaaagaggactacttcaagaaaatcgagtgcttcgactccgtggaaatctccggcgtggaagatcggttcaacgcctccctgggcacataccacgatctgctgaaaattatcaaggacaaggacttcctggacaatgaggaaaacgaggacattctggaagatatcgtgctgaccctgacactgtttgaggacagagagatgatcgaggaacggctgaaaacctatgcccacctgttcgacgacaaagtgatgaagcagctgaagcggcggagatacaccggctggggcaggctgagccggaagctgatcaacggcatccgggacaagcagtccggcaagacaatcctggatttcctgaagtccgacggcttcgccaacagaaacttcatgcagctgatccacgacgacagcctgacctttaaagaggacatccagaaagcccaggtgtccggccagggcgatagcctgcacgagcacattgccaatctggccggcagccccgccattaagaagggcatcctgcagacagtgaaggtggtggacgagctcgtgaaagtgatgggccggcacaagcccgagaacatcgtgatcgaaatggccagagagaaccagaccacccagaagggacagaagaacagccgcgagagaatgaagcggatcgaagagggcatcaaagagctgggcagccagatcctgaaagaacaccccgtggaaaacacccagctgcagaacgagaagctgtacctgtactacctgcagaatgggcgggatatgtacgtggaccaggaactggacatcaaccggctgtccgactacgatgtggacgctatcgtgcctcagagctttctgaaggacgactccatcgataacaaagtgctgactcggagcgacaagaaccggggcaagagcgacaacgtgccctccgaagaggtcgtgaagaagatgaagaactactggcgccagctgctgaatgccaagctgattacccagaggaagttcgacaatctgaccaaggccgagagaggcggcctgagcgaactggataaggccggcttcatcaagagacagctggtggaaacccggcagatcacaaagcacgtggcacagatcctggactcccggatgaacactaagtacgacgagaacgacaaactgatccgggaagtgaaagtgatcaccctgaagtccaagctggtgtccgatttccggaaggatttccagttttacaaagtgcgcgagatcaacaactaccaccacgcccacgacgcctacctgaacgccgtcgtgggaaccgccctgatcaaaaagtaccctaagctggaaagcgagttcgtgtacggcgactacaaggtgtacgacgtgcggaagatgatcgccaagagcgagcaggaaatcggcaaggctaccgccaagtacttcttctacagcaacatcatgaactttttcaagaccgagattaccctggccaacggcgagatccggaagcggcctctgatcgagacaaacggcgaaacaggcgagatcgtgtgggataagggccgggactttgccaccgtgcggaaagtgctgtctatgccccaagtgaatatcgtgaaaaagaccgaggtgcagacaggcggcttcagcaaagagtctatcctgcccaagaggaacagcgacaagctgatcgccagaaagaaggactgggaccctaagaagtacggcggcttcgacagccccaccgtggcctattctgtgctggtggtggccaaagtggaaaagggcaagtccaagaaactgaagagtgtgaaagagctgctggggatcaccatcatggaaagaagcagcttcgagaagaatcccatcgactttctggaagccaagggctacaaagaagtgaaaaaggacctgatcatcaagctgcctaagtactccctgttcgagctggaaaacggccggaagagaatgctggcctctgccggcgaactgcagaagggaaacgaactggccctgccctccaaatatgtgaacttcctgtacctggccagccactatgagaagctgaagggctcccccgaggataatgagcagaaacagctgtttgtggaacagcacaaacactacctggacgagatcatcgagcagatcagcgagttctccaagagagtgatcctggccgacgctaatctggacaaggtgctgagcgcctacaacaagcacagagacaagcctatcagagagcaggccgagaatatcatccacctgtttaccctgaccaatctgggagcccctgccgccttcaagtactttgacaccaccatcgaccggaagaggtacaccagcaccaaagaggtgctggacgccaccctgatccaccagagcatcaccggcctgtacgagacacggatcgacctgtctcagctgggaggcgacgcctatccctatgacgtgcccgattatgccagcctgggcagcggctcccccaagaaaaaacgcaaggtggaagatcctaagaaaaagcggaaagtggacggcggagggccgagctctggcgcacccccaccaagtggagggtctcctgccgggtccccaacatctactgaagaaggcaccagcgaatccgcaacgcccgagtcaggccctggtacctccacagaaccatctgaaggtagtgcgcctggttccccagctggaagccctacttccaccgaagaaggcacgtcaaccgaaccaagtgaaggatctgcccctgggaccagcactgaaccatctgagcggacactggtgaccttcaaggatgtatttgtggacttcaccagggaggagtggaagctgctggacactgctcagcagatcgtgtacagaaatgtgatgctggagaactataagaacctggtttccttgggttatcagcttactaagccagatgtgatcctccggttggagaagggagaagagcccagcggcagcgagacccccggtaccagcgagggcggccctagcagcggcgcccctccccctagcggcggcagccctgccggatcccctacaagcaccgaagaaggcacaagcgagtccgctacccctgagtccggccctggcacctccacagagcctagcgagggatccgctcctggatcccctgccggaagccctacctccaccgaggagggcacaagcaccgagccttccgagggcagcgcccccggaacaagcaccgaacctagcgagagcgccacccccgagagcatgttcgaaaccgtgcctgtgtggaggagacagccagtccgggtgctgtccctttttgaagacatcaagaaagagctgacgagtttgggctttttggaaagtggttctgacccgggacaactgaagcatgtggttgatgtcacagacacagtgaggaaggatgtggaggagtggggacccttcgatcttgtgtacggcgccacacctcccctgggccacacctgtgaccgtcctcccagctggtacctgttccagttccaccggctcctgcagtacgcacggcccaagccaggcagccccaggcccttcttctggatgttcgtggacaatctggtgctgaacaaggaagacctggacgtcgcatctcgcttcctggagatggagccagtcaccatcccagatgtccacggcggatccttgcagaatgctgtccgcgtgtggagcaacatcccagccataaggagcagcaggcactgggctctggtttcggaagaagaattgtccctgctggcccagaacaagcagagctcgaagctcgcggccaagtggcccaccaagctggtgaagaactgctttctccccctaagagaatatttcaagtatttttcaacagaactcacttcctctttatctagcggcaatagtaacgctaacagccgcgggccgagcttcagcagcggcctggtgccgttaagcttgcgcggcagccatatgaaccatgaccaggaatttgaccccccaaaggtttacccacctgtgccagctgagaagaggaagcccatccgcgtgctgtctctctttgatgggattgctacagggctcctggtgctgaaggacctgggcatccaagtggaccgctacattgcctccgaggtgtgtgaggactccatcacggtgggcatggtgcggcaccagggaaagatcatgtacgtcggggacgtccgcagcgtcacacagaagcatatccaggagtggggcccattcgacctggtgattggaggcagtccctgcaatgacctctccattgtcaaccctgcccgcaagggactttatgagggtactggccgcctcttctttgagttctaccgcctcctgcatgatgcgcggcccaaggagggagatgatcgccccttcttctggctctttgagaatgtggtggccatgggcgttagtgacaagagggacatctcgcgatttcttgagtctaaccccgtgatgattgacgccaaagaagtgtctgctgcacacagggcccgttacttctggggtaaccttcctggcatgaacaggcctttggcatccactgtgaatgataagctggagctgcaagagtgtctggagcacggcagaatagccaagttcagcaaagtgaggaccattaccaccaggtcaaactctataaagcagggcaaagaccagcatttccccgtcttcatgaacgagaaggaggacatcctgtggtgcactgaaatggaaagggtgtttggcttccccgtccactacacagacgtctccaacatgagccgcttggcgaggcagagactgctgggccgatcgtggagcgtgccggtcatccgccacctcttcgctccgctgaaggaatattttgcttgtgtgctcgaggctactaacttcagcctgctgaagcaggctggagacgtggaggagaaccctggacctatgcattaatgagatcccaagcacgcagcaatgcagctcaaaacgcttagcctagccacacccccacgggaaacagcagtgattaacctttagcaataaacgaaagtttaactaagctatactaaccccagggttggtcaatttcgtgccagccacaccctggtactgcatgcacgcaatgctagctgcccctttcccgtcctgggcaccccgagtctcccccgaccccgggtcccaggtatgctcccacctccacctgccccactcaccacctctgctagttccagacacctccgagacgaggaaaaaaaaaaaaaaaaaaaaaaaaaaaaaaaaaaaaaaaaaaaaaaaaaaaaaaaaaaaaaaaaaaaaaaaaaaaaaaaaaaaaaaaaaaaaaaaaaaaaaaaaaaaaaaaaaaaaaaaaaaaaaaaaaaaaaaaaaaaaaaaaaaaaaaaaaaaaaaaaaaaaaaaaaaaaaaaaaaaaaaaaaaaaaaaaaaaaaaaaaaaaaaaaaaaaaaaaaaaaaaaaaaaaaaaaaaaaaaaaaaaaaaaaaaaaaaaaaaaaaaaaaaaaaaaaaaaaaaaaaaaaaaaaaaaaaaaaaaaaaaaaaaaaaaaaaaaaaaaaaaaaaaaaaaaaaaaaaaaaaaaaaaaaaaaaaaaaaaaaaaaaaaaaaaaaaaaaaaaaaaaaaaaaaaaaaaccgtcttcaagctttctagaaattcactggccgtcgttttacaacgtcgtgactgggaaaaccctggcgttacccaacttaatcgccttgcagcacatccccctttcgccagctggcgtaatagcgaagaggcccgcaccgatcgcccttcccaacagttgcgcagcctgaatggcgaatggcgcctgatgcggtattttctccttacgcatctgtgcggtatttcacaccgcatatggtgcactctcagtacaatctgctctgatgccgcatagttaagccagccccgacacccgccaacacccgctgacgcgccctgacgggcttgtctgctcccggcatccgcttacagacaagctgtgaccgtctccgggagctgcatgtgtcagaggttttcaccgtcatcaccgaaacgcgcgagacgaaagggcctcgtgatacgcctatttttataggttaatgtcatgataataatggtttcttagacgtcaggtggcacttttcggggaaatgtgcgcggaacccctatttgtttatttttctaaatacattcaaatatgtatccgctcatgagacaataaccctgataaatgcttcaataatattgaaaaaggaagagtatgagtattcaacatttccgtgtcgcccttattcccttttttgcggcattttgccttcctgtttttgctcacccagaaacgctggtgaaagtaaaagatgctgaagatcagttgggtgcacgagtgggttacatcgaactggatctcaacagcggtaagatccttgagagttttcgccccgaagaacgttttccaatgatgagcacttttaaagttctgctatgtggcgcggtattatcccgtattgacgccgggcaagagcaactcggtcgccgcatacactattctcagaatgacttggttgagtactcaccagtcacagaaaagcatcttacggatggcatgacagtaagagaattatgcagtgctgccataaccatgagtgataacactgcggccaacttacttctgacaacgatcggaggaccgaaggagctaaccgcttttttgcacaacatgggggatcatgtaactcgccttgatcgttgggaaccggagctgaatgaagccataccaaacgacgagcgtgacaccacgatgcctgtagcaatggcaacaacgttgcgcaaactattaactggcgaactacttactctagcttcccggcaacaattaatagactggatggaggcggataaagttgcaggaccacttctgcgctcggcccttccggctggctggtttattgctgataaatctggagccggtgagcgtgggtctcgcggtatcattgcagcactggggccagatggtaagccctcccgtatcgtagttatctacacgacggggagtcaggcaactatggatgaacgaaatagacagatcgctgagataggtgcctcactgattaagcattggtaactgtcagaccaagtttactcatatatactttagattgatttaaaacttcatttttaatttaaaaggatctaggtgaagatcctttttgataatctcatgaccaaaatcccttaacgtgagttttcgttccactgagcgtcagaccccgtagaaaagatcaaaggatcttcttgagatcctttttttctgcgcgtaatctgctgcttgcaaacaaaaaaaccaccgctaccagcggtggtttgtttgccggatcaagagctaccaactctttttccgaaggtaactggcttcagcagagcgcagataccaaatactgttcttctagtgtagccgtagttaggccaccacttcaagaactctgtagcaccgcctacatacctcgctctgctaatcctgttaccagtggctgctgccagtggcgataagtcgtgtcttaccgggttggactcaagacgatagttaccggataaggcgcagcggtcgggctgaacggggggttcgtgcacacagcccagcttggagcgaacgacctacaccgaactgagatacctacagcgtgagctatgagaaagcgccacgcttcccgaagggagaaaggcggacaggtatccggtaagcggcagggtcggaacaggagagcgcacgagggagcttccagggggaaacgcctggtatctttatagtcctgtcgggtttcgccacctctgacttgagcgtcgatttttgtgatgctcgtcaggggggcggagcctatggaaaaacgccagcaacgcggcctttttacggttcctggccttttgctggccttttgctcacatgttctttcctgcgttatcccctgattctgtggataaccgtattaccgcctttgagtgagctgataccgctcgccgcagccgaacgaccgagcgcagcgagtcagtgagcgaggaagcggaagagcgcccaatacgcaaaccgcctctccccgcgcgttggccgattcattaatgcagctggcacgacaggtttcccgactggaaagcgggcagtgagcgcaacgcaattaatgtgagttagctcactcattaggcaccccaggctttacactttatgcttccggctcgtatgttgtgtggaattgtgagcggataacaatttcacacaggaaacagctatgaccatgattacgcctctagaaagctttaatacgactcactataaggactcactatttgttttcgcgcccagttgcaaaaagtgtcgacatttgcttctgacacaactgtgttcactagcaacctcaaacagacacctta

SEQ ID NO: 147 - DNA, 10118 bp, synthetic construct
  misc_feature 1..10118: note = V29 DNA
  source 1..10118: mol_type = other DNA
attaagccaccatgccaaaaaagaagagaaaggtaatggacaagaagtacagcatcggcctggccatcggcaccaactctgtgggctgggccgtgatcaccgacgagtacaaggtgcccagcaagaaattcaaggtgctgggcaacaccgaccggcacagcatcaagaagaacctgatcggcgccctgctgttcgacagcggagaaacagccgaggccacccggctgaagagaaccgccagaagaagatacaccagacggaagaaccggatctgctatctgcaagagatcttcagcaacgagatggccaaggtggacgacagcttcttccacagactggaagagtccttcctggtggaagaggataagaagcacgagcggcaccccatcttcggcaacatcgtggacgaggtggcctaccacgagaagtaccccaccatctaccacctgagaaagaaactggtggacagcaccgacaaggccgacctgcggctgatctatctggccctggcccacatgatcaagttccggggccacttcctgatcgagggcgacctgaaccccgacaacagcgacgtggacaagctgttcatccagctggtgcagacctacaaccagctgttcgaggaaaaccccatcaacgccagcggcgtggacgccaaggccatcctgtctgccagactgagcaagagcagacggctggaaaatctgatcgcccagctgcccggcgagaagaagaatggcctgttcggcaacctgattgccctgagcctgggcctgacccccaacttcaagagcaacttcgacctggccgaggatgccaaactgcagctgagcaaggacacctacgacgacgacctggacaacctgctggcccagatcggcgaccagtacgccgacctgtttctggccgccaagaacctgtccgacgccatcctgctgagcgacatcctgagagtgaacaccgagatcaccaaggcccccctgagcgcctctatgatcaagagatacgacgagcaccaccaggacctgaccctgctgaaagctctcgtgcggcagcagctgcctgagaagtacaaagagattttcttcgaccagagcaagaacggctacgccggctacatcgatggcggagccagccaggaagagttctacaagttcatcaagcccatcctggaaaagatggacggcaccgaggaactgctcgtgaagctgaacagagaggacctgctgcggaagcagcggaccttcgacaacggcagcatcccccaccagatccacctgggagagctgcacgccattctgcggcggcaggaagatttttacccattcctgaaggacaaccgggaaaagatcgagaagatcctgaccttccgcatcccctactacgtgggccctctggccaggggaaacagcagattcgcctggatgaccagaaagagcgaggaaaccatcaccccctggaacttcgaggaagtggtggacaagggcgccagcgcccagagcttcatcgagcggatgaccaacttcgataagaacctgcccaacgagaaggtgctgcccaagcacagcctgctgtacgagtacttcaccgtgtacaacgagctgaccaaagtgaaatacgtgaccgagggaatgagaaagcccgccttcctgagcggcgagcagaaaaaagccatcgtggacctgctgttcaagaccaaccggaaagtgaccgtgaagcagctgaaagaggactacttcaagaaaatcgagtgcttcgactccgtggaaatctccggcgtggaagatcggttcaacgcctccctgggcacataccacgatctgctgaaaattatcaaggacaaggacttcctggacaatgaggaaaacgaggacattctggaagatatcgtgctgaccctgacactgtttgaggacagagagatgatcgaggaacggctgaaaacctatgcccacctgttcgacgacaaagtgatgaagcagctgaagcggcggagatacaccggctggggcaggctgagccggaagctgatcaacggcatccgggacaagcagtccggcaagacaatcctggatttcctgaagtccgacggcttcgccaacagaaacttcatgcagctgatccacgacgacagcctgacctttaaagaggacatccagaaagcccaggtgtccggccagggcgatagcctgcacgagcacattgccaatctggccggcagccccgccattaagaagggcatcctgcagacagtgaaggtggtggacgagctcgtgaaagtgatgggccggcacaagcccgagaacatcgtgatcgaaatggccagagagaaccagaccacccagaagggacagaagaacagccgcgagagaatgaagcggatcgaagagggcatcaaagagctgggcagccagatcctgaaagaacaccccgtggaaaacacccagctgcagaacgagaagctgtacctgtactacctgcagaatgggcgggatatgtacgtggaccaggaactggacatcaaccggctgtccgactacgatgtggacgctatcgtgcctcagagctttctgaaggacgactccatcgataacaaagtgctgactcggagcgacaagaaccggggcaagagcgacaacgtgccctccgaagaggtcgtgaagaagatgaagaactactggcgccagctgctgaatgccaagctgattacccagaggaagttcgacaatctgaccaaggccgagagaggcggcctgagcgaactggataaggccggcttcatcaagagacagctggtggaaacccggcagatcacaaagcacgtggcacagatcctggactcccggatgaacactaagtacgacgagaacgacaaactgatccgggaagtgaaagtgatcaccctgaagtccaagctggtgtccgatttccggaaggatttccagttttacaaagtgcgcgagatcaacaactaccaccacgcccacgacgcctacctgaacgccgtcgtgggaaccgccctgatcaaaaagtaccctaagctggaaagcgagttcgtgtacggcgactacaaggtgtacgacgtgcggaagatgatcgccaagagcgagcaggaaatcggcaaggctaccgccaagtacttcttctacagcaacatcatgaactttttcaagaccgagattaccctggccaacggcgagatccggaagcggcctctgatcgagacaaacggcgaaacaggcgagatcgtgtgggataagggccgggactttgccaccgtgcggaaagtgctgtctatgccccaagtgaatatcgtgaaaaagaccgaggtgcagacaggcggcttcagcaaagagtctatcctgcccaagaggaacagcgacaagctgatcgccagaaagaaggactgggaccctaagaagtacggcggcttcgacagccccaccgtggcctattctgtgctggtggtggccaaagtggaaaagggcaagtccaagaaactgaagagtgtgaaagagctgctggggatcaccatcatggaaagaagcagcttcgagaagaatcccatcgactttctggaagccaagggctacaaagaagtgaaaaaggacctgatcatcaagctgcctaagtactccctgttcgagctggaaaacggccggaagagaatgctggcctctgccggcgaactgcagaagggaaacgaactggccctgccctccaaatatgtgaacttcctgtacctggccagccactatgagaagctgaagggctcccccgaggataatgagcagaaacagctgtttgtggaacagcacaaacactacctggacgagatcatcgagcagatcagcgagttctccaagagagtgatcctggccgacgctaatctggacaaggtgctgagcgcctacaacaagcacagagacaagcctatcagagagcaggccgagaatatcatccacctgtttaccctgaccaatctgggagcccctgccgccttcaagtactttgacaccaccatcgaccggaagaggtacaccagcaccaaagaggtgctggacgccaccctgatccaccagagcatcaccggcctgtacgagacacggatcgacctgtctcagctgggaggcgacgcctatccctatgacgtgcccgattatgccagcctgggcagcggctcccccaagaaaaaacgcaaggtggaagatcctaagaaaaagcggaaagtggacggcggagggccgagctctggcgcacccccaccaagtggagggtctcctgccgggtccccaacatctactgaagaaggcaccagcgaatccgcaacgcccgagtcaggccctggtacctccacagaaccatctgaaggtagtgcgcctggttccccagctggaagccctacttccaccgaagaaggcacgtcaaccgaaccaagtgaaggatctgcccctgggaccagcactgaaccatctgagcggacactcgagctgttccgcgacgtggccattgtgttctctcaagaggaatggcagtggctggcccctgctcagagagatctctaccgcgacgttatgctggagacatactccaatctcgtgtccctcggcctggccgtgtccaaacctgatgtgatcagcttcctcgagcagggaaaagaaccttggatgagcggcagcgagacccccggtaccagcgagggcggccctagcagcggcgcccctccccctagcggcggcagccctgccggatcccctacaagcaccgaagaaggcacaagcgagtccgctacccctgagtccggccctggcacctccacagagcctagcgagggatccgctcctggatcccctgccggaagccctacctccaccgaggagggcacaagcaccgagccttccgagggcagcgcccccggaacaagcaccgaacctagcgagagcgccacccccgagagcatgttcgaaaccgtgcctgtgtggaggagacagccagtccgggtgctgtccctttttgaagacatcaagaaagagctgacgagtttgggctttttggaaagtggttctgacccgggacaactgaagcatgtggttgatgtcacagacacagtgaggaaggatgtggaggagtggggacccttcgatcttgtgtacggcgccacacctcccctgggccacacctgtgaccgtcctcccagctggtacctgttccagttccaccggctcctgcagtacgcacggcccaagccaggcagccccaggcccttcttctggatgttcgtggacaatctggtgctgaacaaggaagacctggacgtcgcatctcgcttcctggagatggagccagtcaccatcccagatgtccacggcggatccttgcagaatgctgtccgcgtgtggagcaacatcccagccataaggagcagcaggcactgggctctggtttcggaagaagaattgtccctgctggcccagaacaagcagagctcgaagctcgcggccaagtggcccaccaagctggtgaagaactgctttctccccctaagagaatatttcaagtatttttcaacagaactcacttcctctttatctagcggcaatagtaacgctaacagccgcgggccgagcttcagcagcggcctggtgccgttaagcttgcgcggcagccatatgaaccatgaccaggaatttgaccccccaaaggtttacccacctgtgccagctgagaagaggaagcccatccgcgtgctgtctctctttgatgggattgctacagggctcctggtgctgaaggacctgggcatccaagtggaccgctacattgcctccgaggtgtgtgaggactccatcacggtgggcatggtgcggcaccagggaaagatcatgtacgtcggggacgtccgcagcgtcacacagaagcatatccaggagtggggcccattcgacctggtgattggaggcagtccctgcaatgacctctccattgtcaaccctgcccgcaagggactttatgagggtactggccgcctcttctttgagttctaccgcctcctgcatgatgcgcggcccaaggagggagatgatcgccccttcttctggctctttgagaatgtggtggccatgggcgttagtgacaagagggacatctcgcgatttcttgagtctaaccccgtgatgattgacgccaaagaagtgtctgctgcacacagggcccgttacttctggggtaaccttcctggcatgaacaggcctttggcatccactgtgaatgataagctggagctgcaagagtgtctggagcacggcagaatagccaagttcagcaaagtgaggaccattaccaccaggtcaaactctataaagcagggcaaagaccagcatttccccgtcttcatgaacgagaaggaggacatcctgtggtgcactgaaatggaaagggtgtttggcttccccgtccactacacagacgtctccaacatgagccgcttggcgaggcagagactgctgggccgatcgtggagcgtgccggtcatccgccacctcttcgctccgctgaaggaatattttgcttgtgtgctcgaggctactaacttcagcctgctgaagcaggctggagacgtggaggagaaccctggacctatgcattaatgagatcccaagcacgcagcaatgcagctcaaaacgcttagcctagccacacccccacgggaaacagcagtgattaacctttagcaataaacgaaagtttaactaagctatactaaccccagggttggtcaatttcgtgccagccacaccctggtactgcatgcacgcaatgctagctgcccctttcccgtcctgggcaccccgagtctcccccgaccccgggtcccaggtatgctcccacctccacctgccccactcaccacctctgctagttccagacacctccgagacgaggaaaaaaaaaaaaaaaaaaaaaaaaaaaaaaaaaaaaaaaaaaaaaaaaaaaaaaaaaaaaaaaaaaaaaaaaaaaaaaaaaaaaaaaaaaaaaaaaaaaaaaaaaaaaaaaaaaaaaaaaaaaaaaaaaaaaaaaaaaaaaaaaaaaaaaaaaaaaaaaaaaaaaaaaaaaaaaaaaaaaaaaaaaaaaaaaaaaaaaaaaaaaaaaaaaaaaaaaaaaaaaaaaaaaaaaaaaaaaaaaaaaaaaaaaaaaaaaaaaaaaaaaaaaaaaaaaaaaaaaaaaaaaaaaaaaaaaaaaaaaaaaaaaaaaaaaaaaaaaaaaaaaaaaaaaaaaaaaaaaaaaaaaaaaaaaaaaaaaaaaaaaaaaaaaaaaaaaaaaaaaaaaaaaaaaaaaaccgtcttcaagctttctagaaattcactggccgtcgttttacaacgtcgtgactgggaaaaccctggcgttacccaacttaatcgccttgcagcacatccccctttcgccagctggcgtaatagcgaagaggcccgcaccgatcgcccttcccaacagttgcgcagcctgaatggcgaatggcgcctgatgcggtattttctccttacgcatctgtgcggtatttcacaccgcatatggtgcactctcagtacaatctgctctgatgccgcatagttaagccagccccgacacccgccaacacccgctgacgcgccctgacgggcttgtctgctcccggcatccgcttacagacaagctgtgaccgtctccgggagctgcatgtgtcagaggttttcaccgtcatcaccgaaacgcgcgagacgaaagggcctcgtgatacgcctatttttataggttaatgtcatgataataatggtttcttagacgtcaggtggcacttttcggggaaatgtgcgcggaacccctatttgtttatttttctaaatacattcaaatatgtatccgctcatgagacaataaccctgataaatgcttcaataatattgaaaaaggaagagtatgagtattcaacatttccgtgtcgcccttattcccttttttgcggcattttgccttcctgtttttgctcacccagaaacgctggtgaaagtaaaagatgctgaagatcagttgggtgcacgagtgggttacatcgaactggatctcaacagcggtaagatccttgagagttttcgccccgaagaacgttttccaatgatgagcacttttaaagttctgctatgtggcgcggtattatcccgtattgacgccgggcaagagcaactcggtcgccgcatacactattctcagaatgacttggttgagtactcaccagtcacagaaaagcatcttacggatggcatgacagtaagagaattatgcagtgctgccataaccatgagtgataacactgcggccaacttacttctgacaacgatcggaggaccgaaggagctaaccgcttttttgcacaacatgggggatcatgtaactcgccttgatcgttgggaaccggagctgaatgaagccataccaaacgacgagcgtgacaccacgatgcctgtagcaatggcaacaacgttgcgcaaactattaactggcgaactacttactctagcttcccggcaacaattaatagactggatggaggcggataaagttgcaggaccacttctgcgctcggcccttccggctggctggtttattgctgataaatctggagccggtgagcgtgggtctcgcggtatcattgcagcactggggccagatggtaagccctcccgtatcgtagttatctacacgacggggagtcaggcaactatggatgaacgaaatagacagatcgctgagataggtgcctcactgattaagcattggtaactgtcagaccaagtttactcatatatactttagattgatttaaaacttcatttttaatttaaaaggatctaggtgaagatcctttttgataatctcatgaccaaaatcccttaacgtgagttttcgttccactgagcgtcagaccccgtagaaaagatcaaaggatcttcttgagatcctttttttctgcgcgtaatctgctgcttgcaaacaaaaaaaccaccgctaccagcggtggtttgtttgccggatcaagagctaccaactctttttccgaaggtaactggcttcagcagagcgcagataccaaatactgttcttctagtgtagccgtagttaggccaccacttcaagaactctgtagcaccgcctacatacctcgctctgctaatcctgttaccagtggctgctgccagtggcgataagtcgtgtcttaccgggttggactcaagacgatagttaccggataaggcgcagcggtcgggctgaacggggggttcgtgcacacagcccagcttggagcgaacgacctacaccgaactgagatacctacagcgtgagctatgagaaagcgccacgcttcccgaagggagaaaggcggacaggtatccggtaagcggcagggtcggaacaggagagcgcacgagggagcttccagggggaaacgcctggtatctttatagtcctgtcgggtttcgccacctctgacttgagcgtcgatttttgtgatgctcgtcaggggggcggagcctatggaaaaacgccagcaacgcggcctttttacggttcctggccttttgctggccttttgctcacatgttctttcctgcgttatcccctgattctgtggataaccgtattaccgcctttgagtgagctgataccgctcgccgcagccgaacgaccgagcgcagcgagtcagtgagcgaggaagcggaagagcgcccaatacgcaaaccgcctctccccgcgcgttggccgattcattaatgcagctggcacgacaggtttcccgactggaaagcgggcagtgagcgcaacgcaattaatgtgagttagctcactcattaggcaccccaggctttacactttatgcttccggctcgtatgttgtgtggaattgtgagcggataacaatttcacacaggaaacagctatgaccatgattacgcctctagaaagctttaatacgactcactataaggactcactatttgttttcgcgcccagttgcaaaaagtgtcgacatttgcttctgacacaactgtgttcactagcaacctcaaacagacacctta

SEQ ID NO: 148 - DNA, 10118 bp, synthetic construct
  misc_feature 1..10118: note = V30 DNA
  source 1..10118: mol_type = other DNA
attaagccaccatgccaaaaaagaagagaaaggtaatggacaagaagtacagcatcggcctggccatcggcaccaactctgtgggctgggccgtgatcaccgacgagtacaaggtgcccagcaagaaattcaaggtgctgggcaacaccgaccggcacagcatcaagaagaacctgatcggcgccctgctgttcgacagcggagaaacagccgaggccacccggctgaagagaaccgccagaagaagatacaccagacggaagaaccggatctgctatctgcaagagatcttcagcaacgagatggccaaggtggacgacagcttcttccacagactggaagagtccttcctggtggaagaggataagaagcacgagcggcaccccatcttcggcaacatcgtggacgaggtggcctaccacgagaagtaccccaccatctaccacctgagaaagaaactggtggacagcaccgacaaggccgacctgcggctgatctatctggccctggcccacatgatcaagttccggggccacttcctgatcgagggcgacctgaaccccgacaacagcgacgtggacaagctgttcatccagctggtgcagacctacaaccagctgttcgaggaaaaccccatcaacgccagcggcgtggacgccaaggccatcctgtctgccagactgagcaagagcagacggctggaaaatctgatcgcccagctgcccggcgagaagaagaatggcctgttcggcaacctgattgccctgagcctgggcctgacccccaacttcaagagcaacttcgacctggccgaggatgccaaactgcagctgagcaaggacacctacgacgacgacctggacaacctgctggcccagatcggcgaccagtacgccgacctgtttctggccgccaagaacctgtccgacgccatcctgctgagcgacatcctgagagtgaacaccgagatcaccaaggcccccctgagcgcctctatgatcaagagatacgacgagcaccaccaggacctgaccctgctgaaagctctcgtgcggcagcagctgcctgagaagtacaaagagattttcttcgaccagagcaagaacggctacgccggctacatcgatggcggagccagccaggaagagttctacaagttcatcaagcccatcctggaaaagatggacggcaccgaggaactgctcgtgaagctgaacagagaggacctgctgcggaagcagcggaccttcgacaacggcagcatcccccaccagatccacctgggagagctgcacgccattctgcggcggcaggaagatttttacccattcctgaaggacaaccgggaaaagatcgagaagatcctgaccttccgcatcccctactacgtgggccctctggccaggggaaacagcagattcgcctggatgaccagaaagagcgaggaaaccatcaccccctggaacttcgaggaagtggtggacaagggcgccagcgcccagagcttcatcgagcggatgaccaacttcgataagaacctgcccaacgagaaggtgctgcccaagcacagcctgctgtacgagtacttcaccgtgtacaacgagctgaccaaagtgaaatacgtgaccgagggaatgagaaagcccgccttcctgagcggcgagcagaaaaaagccatcgtggacctgctgttcaagaccaaccggaaagtgaccgtgaagcagctgaaagaggactacttcaagaaaatcgagtgcttcgactccgtggaaatctccggcgtggaagatcggttcaacgcctccctgggcacataccacgatctgctgaaaattatcaaggacaaggacttcctggacaatgaggaaaacgaggacattctggaagatatcgtgctgaccctgacactgtttgaggacagagagatgatcgaggaacggctgaaaacctatgcccacctgttcgacgacaaagtgatgaagcagctgaagcggcggagatacaccggctggggcaggctgagccggaagctgatcaacggcatccgggacaagcagtccggcaagacaatcctggatttcctgaagtccgacggcttcgccaacagaaacttcatgcagctgatccacgacgacagcctgacctttaaagaggacatccagaaagcccaggtgtccggccagggcgatagcctgcacgagcacattgccaatctggccggcagccccgccattaagaagggcatcctgcagacagtgaaggtggtggacgagctcgtgaaagtgatgggccggcacaagcccgagaacatcgtgatcgaaatggccagagagaaccagaccacccagaagggacagaagaacagccgcgagagaatgaagcggatcgaagagggcatcaaagagctgggcagccagatcctgaaagaacaccccgtggaaaacacccagctgcagaacgagaagctgtacctgtactacctgcagaatgggcgggatatgtacgtggaccaggaactggacatcaaccggctgtccgactacgatgtggacgctatcgtgcctcagagctttctgaaggacgactccatcgataacaaagtgctgactcggagcgacaagaaccggggcaagagcgacaacgtgccctccgaagaggtcgtgaagaagatgaagaactactggcgccagctgctgaatgccaagctgattacccagaggaagttcgacaatctgaccaaggccgagagaggcggcctgagcgaactggataaggccggcttcatcaagagacagctggtggaaacccggcagatcacaaagcacgtggcacagatcctggactcccggatgaacactaagtacgacgagaacgacaaactgatccgggaagtgaaagtgatcaccctgaagtccaagctggtgtccgatttccggaaggatttccagttttacaaagtgcgcgagatcaacaactaccaccacgcccacgacgcctacctgaacgccgtcgtgggaaccgccctgatcaaaaagtaccctaagctggaaagcgagttcgtgtacggcgactacaaggtgtacgacgtgcggaagatgatcgccaagagcgagcaggaaatcggcaaggctaccgccaagtacttcttctacagcaacatcatgaactttttcaagaccgagattaccctggccaacggcgagatccggaagcggcctctgatcgagacaaacggcgaaacaggcgagatcgtgtgggataagggccgggactttgccaccgtgcggaaagtgctgtctatgccccaagtgaatatcgtgaaaaagaccgaggtgcagacaggcggcttcagcaaagagtctatcctgcccaagaggaacagcgacaagctgatcgccagaaagaaggactgggaccctaagaagtacggcggcttcgacagccccaccgtggcctattctgtgctggtggtggccaaagtggaaaagggcaagtccaagaaactgaagagtgtgaaagagctgctggggatcaccatcatggaaagaagcagcttcgagaagaatcccatcgactttctggaagccaagggctacaaagaagtgaaaaaggacctgatcatcaagctgcctaagtactccctgttcgagctggaaaacggccggaagagaatgctggcctctgccggcgaactgcagaagggaaacgaactggccctgccctccaaatatgtgaacttcctgtacctggccagccactatgagaagctgaagggctcccccgaggataatgagcagaaacagctgtttgtggaacagcacaaacactacctggacgagatcatcgagcagatcagcgagttctccaagagagtgatcctggccgacgctaatctggacaaggtgctgagcgcctacaacaagcacagagacaagcctatcagagagcaggccgagaatatcatccacctgtttaccctgaccaatctgggagcccctgccgccttcaagtactttgacaccaccatcgaccggaagaggtacaccagcaccaaagaggtgctggacgccaccctgatccaccagagcatcaccggcctgtacgagacacggatcgacctgtctcagctgggaggcgacgcctatccctatgacgtgcccgattatgccagcctgggcagcggctcccccaagaaaaaacgcaaggtggaagatcctaagaaaaagcggaaagtggacggcggagggccgagctctggcgcacccccaccaagtggagggtctcctgccgggtccccaacatctactgaagaaggcaccagcgaatccgcaacgcccgagtcaggccctggtacctccacagaaccatctgaaggtagtgcgcctggttccccagctggaagccctacttccaccgaagaaggcacgtcaaccgaaccaagtgaaggatctgcccctgggaccagcactgaaccatctgagcggacactcatggcctttgaggacgtcgccgtgtatttttcccaagaagaatggggactgctcgacactgcccagagagccctgtatcgcagagtcatgctggacaacttcgccctggtggcctccctgggcctgtctacaagcagacccagagtggtcattcagctggaaagaggcgaggaaccctgggtcagcggcagcgagacccccggtaccagcgagggcggccctagcagcggcgcccctccccctagcggcggcagccctgccggatcccctacaagcaccgaagaaggcacaagcgagtccgctacccctgagtccggccctggcacctccacagagcctagcgagggatccgctcctggatcccctgccggaagccctacctccaccgaggagggcacaagcaccgagccttccgagggcagcgcccccggaacaagcaccgaacctagcgagagcgccacccccgagagcatgttcgaaaccgtgcctgtgtggaggagacagccagtccgggtgctgtccctttttgaagacatcaagaaagagctgacgagtttgggctttttggaaagtggttctgacccgggacaactgaagcatgtggttgatgtcacagacacagtgaggaaggatgtggaggagtggggacccttcgatcttgtgtacggcgccacacctcccctgggccacacctgtgaccgtcctcccagctggtacctgttccagttccaccggctcctgcagtacgcacggcccaagccaggcagccccaggcccttcttctggatgttcgtggacaatctggtgctgaacaaggaagacctggacgtcgcatctcgcttcctggagatggagccagtcaccatcccagatgtccacggcggatccttgcagaatgctgtccgcgtgtggagcaacatcccagccataaggagcagcaggcactgggctctggtttcggaagaagaattgtccctgctggcccagaacaagcagagctcgaagctcgcggccaagtggcccaccaagctggtgaagaactgctttctccccctaagagaatatttcaagtatttttcaacagaactcacttcctctttatctagcggcaatagtaacgctaacagccgcgggccgagcttcagcagcggcctggtgccgttaagcttgcgcggcagccatatgaaccatgaccaggaatttgaccccccaaaggtttacccacctgtgccagctgagaagaggaagcccatccgcgtgctgtctctctttgatgggattgctacagggctcctggtgctgaaggacctgggcatccaagtggaccgctacattgcctccgaggtgtgtgaggactccatcacggtgggcatggtgcggcaccagggaaagatcatgtacgtcggggacgtccgcagcgtcacacagaagcatatccaggagtggggcccattcgacctggtgattggaggcagtccctgcaatgacctctccattgtcaaccctgcccgcaagggactttatgagggtactggccgcctcttctttgagttctaccgcctcctgcatgatgcgcggcccaaggagggagatgatcgccccttcttctggctctttgagaatgtggtggccatgggcgttagtgacaagagggacatctcgcgatttcttgagtctaaccccgtgatgattgacgccaaagaagtgtctgctgcacacagggcccgttacttctggggtaaccttcctggcatgaacaggcctttggcatccactgtgaatgataagctggagctgcaagagtgtctggagcacggcagaatagccaagttcagcaaagtgaggaccattaccaccaggtcaaactctataaagcagggcaaagaccagcatttccccgtcttcatgaacgagaaggaggacatcctgtggtgcactgaaatggaaagggtgtttggcttccccgtccactacacagacgtctccaacatgagccgcttggcgaggcagagactgctgggccgatcgtggagcgtgccggtcatccgccacctcttcgctccgctgaaggaatattttgcttgtgtgctcgaggctactaacttcagcctgctgaagcaggctggagacgtggaggagaaccctggacctatgcattaatgagatcccaagcacgcagcaatgcagctcaaaacgcttagcctagccacacccccacgggaaacagcagtgattaacctttagcaataaacgaaagtttaactaagctatactaaccccagggttggtcaatttcgtgccagccacaccctggtactgcatgcacgcaatgctagctgcccctttcccgtcctgggcaccccgagtctcccccgaccccgggtcccaggtatgctcccacctccacctgccccactcaccacctctgctagttccagacacctccgagacgaggaaaaaaaaaaaaaaaaaaaaaaaaaaaaaaaaaaaaaaaaaaaaaaaaaaaaaaaaaaaaaaaaaaaaaaaaaaaaaaaaaaaaaaaaaaaaaaaaaaaaaaaaaaaaaaaaaaaaaaaaaaaaaaaaaaaaaaaaaaaaaaaaaaaaaaaaaaaaaaaaaaaaaaaaaaaaaaaaaaaaaaaaaaaaaaaaaaaaaaaaaaaaaaaaaaaaaaaaaaaaaaaaaaaaaaaaaaaaaaaaaaaaaaaaaaaaaaaaaaaaaaaaaaaaaaaaaaaaaaaaaaaaaaaaaaaaaaaaaaaaaaaaaaaaaaaaaaaaaaaaaaaaaaaaaaaaaaaaaaaaaaaaaaaaaaaaaaaaaaaaaaaaaaaaaaaaaaaaaaaaaaaaaaaaaaaaaaccgtcttcaagctttctagaaattcactggccgtcgttttacaacgtcgtgactgggaaaaccctggcgttacccaacttaatcgccttgcagcacatccccctttcgccagctggcgtaatagcgaagaggcccgcaccgatcgcccttcccaacagttgcgcagcctgaatggcgaatggcgcctgatgcggtattttctccttacgcatctgtgcggtatttcacaccgcatatggtgcactctcagtacaatctgctctgatgccgcatagttaagccagccccgacacccgccaacacccgctgacgcgccctgacgggcttgtctgctcccggcatccgcttacagacaagctgtgaccgtctccgggagctgcatgtgtcagaggttttcaccgtcatcaccgaaacgcgcgagacgaaagggcctcgtgatacgcctatttttataggttaatgtcatgataataatggtttcttagacgtcaggtggcacttttcggggaaatgtgcgcggaacccctatttgtttatttttctaaatacattcaaatatgtatccgctcatgagacaataaccctgataaatgcttcaataatattgaaaaaggaagagtatgagtattcaacatttccgtgtcgcccttattcccttttttgcggcattttgccttcctgtttttgctcacccagaaacgctggtgaaagtaaaagatgctgaagatcagttgggtgcacgagtgggttacatcgaactggatctcaacagcggtaagatccttgagagttttcgccccgaagaacgttttccaatgatgagcacttttaaagttctgctatgtggcgcggtattatcccgtattgacgccgggcaagagcaactcggtcgccgcatacactattctcagaatgacttggttgagtactcaccagtcacagaaaagcatcttacggatggcatgacagtaagagaattatgcagtgctgccataaccatgagtgataacactgcggccaacttacttctgacaacgatcggaggaccgaaggagctaaccgcttttttgcacaacatgggggatcatgtaactcgccttgatcgttgggaaccggagctgaatgaagccataccaaacgacgagcgtgacaccacgatgcctgtagcaatggcaacaacgttgcgcaaactattaactggcgaactacttactctagcttcccggcaacaattaatagactggatggaggcggataaagttgcaggaccacttctgcgctcggcccttccggctggctggtttattgctgataaatctggagccggtgagcgtgggtctcgcggtatcattgcagcactggggccagatggtaagccctcccgtatcgtagttatctacacgacggggagtcaggcaactatggatgaacgaaatagacagatcgctgagataggtgcctcactgattaagcattggtaactgtcagaccaagtttactcatatatactttagattgatttaaaacttcatttttaatttaaaaggatctaggtgaagatcctttttgataatctcatgaccaaaatcccttaacgtgagttttcgttccactgagcgtcagaccccgtagaaaagatcaaaggatcttcttgagatcctttttttctgcgcgtaatctgctgcttgcaaacaaaaaaaccaccgctaccagcggtggtttgtttgccggatcaagagctaccaactctttttccgaaggtaactggcttcagcagagcgcagataccaaatactgttcttctagtgtagccgtagttaggccaccacttcaagaactctgtagcaccgcctacatacctcgctctgctaatcctgttaccagtggctgctgccagtggcgataagtcgtgtcttaccgggttggactcaagacgatagttaccggataaggcgcagcggtcgggctgaacggggggttcgtgcacacagcccagcttggagcgaacgacctacaccgaactgagatacctacagcgtgagctatgagaaagcgccacgcttcccgaagggagaaaggcggacaggtatccggtaagcggcagggtcggaacaggagagcgcacgagggagcttccagggggaaacgcctggtatctttatagtcctgtcgggtttcgccacctctgacttgagcgtcgatttttgtgatgctcgtcaggggggcggagcctatggaaaaacgccagcaacgcggcctttttacggttcctggccttttgctggccttttgctcacatgttctttcctgcgttatcccctgattctgtggataaccgtattaccgcctttgagtgagctgataccgctcgccgcagccgaacgaccgagcgcagcgagtcagtgagcgaggaagcggaagagcgcccaatacgcaaaccgcctctccccgcgcgttggccgattcattaatgcagctggcacgacaggtttcccgactggaaagcgggcagtgagcgcaacgcaattaatgtgagttagctcactcattaggcaccccaggctttacactttatgcttccggctcgtatgttgtgtggaattgtgagcggataacaatttcacacaggaaacagctatgaccatgattacgcctctagaaagctttaatacgactcactataaggactcactatttgttttcgcgcccagttgcaaaaagtgtcgacatttgcttctgacacaactgtgttcactagcaacctcaaacagacacctta

SEQ ID NO: 149 - DNA, 10151 bp, synthetic construct
  misc_feature 1..10151: note = V31 DNA
  source 1..10151: mol_type = other DNA
attaagccaccatgccaaaaaagaagagaaaggtaatggacaagaagtacagcatcggcctggccatcggcaccaactctgtgggctgggccgtgatcaccgacgagtacaaggtgcccagcaagaaattcaaggtgctgggcaacaccgaccggcacagcatcaagaagaacctgatcggcgccctgctgttcgacagcggagaaacagccgaggccacccggctgaagagaaccgccagaagaagatacaccagacggaagaaccggatctgctatctgcaagagatcttcagcaacgagatggccaaggtggacgacagcttcttccacagactggaagagtccttcctggtggaagaggataagaagcacgagcggcaccccatcttcggcaacatcgtggacgaggtggcctaccacgagaagtaccccaccatctaccacctgagaaagaaactggtggacagcaccgacaaggccgacctgcggctgatctatctggccctggcccacatgatcaagttccggggccacttcctgatcgagggcgacctgaaccccgacaacagcgacgtggacaagctgttcatccagctggtgcagacctacaaccagctgttcgaggaaaaccccatcaacgccagcggcgtggacgccaaggccatcctgtctgccagactgagcaagagcagacggctggaaaatctgatcgcccagctgcccggcgagaagaagaatggcctgttcggcaacctgattgccctgagcctgggcctgacccccaacttcaagagcaacttcgacctggccgaggatgccaaactgcagctgagcaaggacacctacgacgacgacctggacaacctgctggcccagatcggcgaccagtacgccgacctgtttctggccgccaagaacctgtccgacgccatcctgctgagcgacatcctgagagtgaacaccgagatcaccaaggcccccctgagcgcctctatgatcaagagatacgacgagcaccaccaggacctgaccctgctgaaagctctcgtgcggcagcagctgcctgagaagtacaaagagattttcttcgaccagagcaagaacggctacgccggctacatcgatggcggagccagccaggaagagttctacaagttcatcaagcccatcctggaaaagatggacggcaccgaggaactgctcgtgaagctgaacagagaggacctgctgcggaagcagcggaccttcgacaacggcagcatcccccaccagatccacctgggagagctgcacgccattctgcggcggcaggaagatttttacccattcctgaaggacaaccgggaaaagatcgagaagatcctgaccttccgcatcccctactacgtgggccctctggccaggggaaacagcagattcgcctggatgaccagaaagagcgaggaaaccatcaccccctggaacttcgaggaagtggtggacaagggcgccagcgcccagagcttcatcgagcggatgaccaacttcgataagaacctgcccaacgagaaggtgctgcccaagcacagcctgctgtacgagtacttcaccgtgtacaacgagctgaccaaagtgaaatacgtgaccgagggaatgagaaagcccgccttcctgagcggcgagcagaaaaaagccatcgtggacctgctgttcaagaccaaccggaaagtgaccgtgaagcagctgaaagaggactacttcaagaaaatcgagtgcttcgactccgtggaaatctccggcgtggaagatcggttcaacgcctccctgggcacataccacgatctgctgaaaattatcaaggacaaggacttcctggacaatgaggaaaacgaggacattctggaagatatcgtgctgaccctgacactgtttgaggacagagagatgatcgaggaacggctgaaaacctatgcccacctgttcgacgacaaagtgatgaagcagctgaagcggcggagatacaccggctggggcaggctgagccggaagctgatcaacggcatccgggacaagcagtccggcaagacaatcctggatttcctgaagtccgacggcttcgccaacagaaacttcatgcagctgatccacgacgacagcctgacctttaaagaggacatccagaaagcccaggtgtccggccagggcgatagcctgcacgagcacattgccaatctggccggcagccccgccattaagaagggcatcctgcagacagtgaaggtggtggacgagctcgtgaaagtgatgggccggcacaagcccgagaacatcgtgatcgaaatggccagagagaaccagaccacccagaagggacagaagaacagccgcgagagaatgaagcggatcgaagagggcatcaaagagctgggcagccagatcctgaaagaacaccccgtggaaaacacccagctgcagaacgagaagctgtacctgtactacctgcagaatgggcgggatatgtacgtggaccaggaactggacatcaaccggctgtccgactacgatgtggacgctatcgtgcctcagagctttctgaaggacgactccatcgataacaaagtgctgactcggagcgacaagaaccggggcaagagcgacaacgtgccctccgaagaggtcgtgaagaagatgaagaactactggcgccagctgctgaatgccaagctgattacccagaggaagttcgacaatctgaccaaggccgagagaggcggcctgagcgaactggataaggccggcttcatcaagagacagctggtggaaacccggcagatcacaaagcacgtggcacagatcctggactcccggatgaacactaagtacgacgagaacgacaaactgatccgggaagtgaaagtgatcaccctgaagtccaagctggtgtccgatttccggaaggatttccagttttacaaagtgcgcgagatcaacaactaccaccacgcccacgacgcctacctgaacgccgtcgtgggaaccgccctgatcaaaaagtaccctaagctggaaagcgagttcgtgtacggcgactacaaggtgtacgacgtgcggaagatgatcgccaagagcgagcaggaaatcggcaaggctaccgccaagtacttcttctacagcaacatcatgaactttttcaagaccgagattaccctggccaacggcgagatccggaagcggcctctgatcgagacaaacggcgaaacaggcgagatcgtgtgggataagggccgggactttgccaccgtgcggaaagtgctgtctatgccccaagtgaatatcgtgaaaaagaccgaggtgcagacaggcggcttcagcaaagagtctatcctgcccaagaggaacagcgacaagctgatcgccagaaagaaggactgggaccctaagaagtacggcggcttcgacagccccaccgtggcctattctgtgctggtggtggccaaagtggaaaagggcaagtccaagaaactgaagagtgtgaaagagctgctggggatcaccatcatggaaagaagcagcttcgagaagaatcccatcgactttctggaagccaagggctacaaagaagtgaaaaaggacctgatcatcaagctgcctaagtactccctgttcgagctggaaaacggccggaagagaatgctggcctctgccggcgaactgcagaagggaaacgaactggccctgccctccaaatatgtgaacttcctgtacctggccagccactatgagaagctgaagggctcccccgaggataatgagcagaaacagctgtttgtggaacagcacaaacactacctggacgagatcatcgagcagatcagcgagttctccaagagagtgatcctggccgacgctaatctggacaaggtgctgagcgcctacaacaagcacagagacaagcctatcagagagcaggccgagaatatcatccacctgtttaccctgaccaatctgggagcccctgccgccttcaagtactttgacaccaccatcgaccggaagaggtacaccagcaccaaagaggtgctggacgccaccctgatccaccagagcatcaccggcctgtacgagacacggatcgacctgtctcagctgggaggcgacgcctatccctatgacgtgcccgattatgccagcctgggcagcggctcccccaagaaaaaacgcaaggtggaagatcctaagaaaaagcggaaagtggacggcggagggccgagctctggcgcacccccaccaagtggagggtctcctgccgggtccccaacatctactgaagaaggcaccagcgaatccgcaacgcccgagtcaggccctggtacctccacagaaccatctgaaggtagtgcgcctggttccccagctggaagccctacttccaccgaagaaggcacgtcaaccgaaccaagtgaaggatctgcccctgggaccagcactgaaccatctgagggcagcggcagcgagacccccggtaccagcgagagcgccacccccgagagccggacactggtgaccttcaaggatgtatttgtggacttcaccagggaggagtggaagctgctggacactgctcagcagatcgtgtacagaaatgtgatgctggagaactataagaacctggtttccttgggttatcagcttactaagccagatgtgatcctccggttggagaagggagaagagcccagcggcagcgagacccccggtaccagcgagagcgctacacccgaatccggccccggcagccccgccggcagccctacaagcaccgaggagggcacctccgaatccgccacccctgagagcggacccggcagcgagcctgccacaagcggcagcgagacacctggaacaagcgagagcgccacacctgaaagcggccccggaacatccaccgagcctagcgagggcagcgcccctggcacaagcacagagccttccgagagcgccacccccgagagcatgttcgaaaccgtgcctgtgtggaggagacagccagtccgggtgctgtccctttttgaagacatcaagaaagagctgacgagtttgggctttttggaaagtggttctgacccgggacaactgaagcatgtggttgatgtcacagacacagtgaggaaggatgtggaggagtggggacccttcgatcttgtgtacggcgccacacctcccctgggccacacctgtgaccgtcctcccagctggtacctgttccagttccaccggctcctgcagtacgcacggcccaagccaggcagccccaggcccttcttctggatgttcgtggacaatctggtgctgaacaaggaagacctggacgtcgcatctcgcttcctggagatggagccagtcaccatcccagatgtccacggcggatccttgcagaatgctgtccgcgtgtggagcaacatcccagccataaggagcagcaggcactgggctctggtttcggaagaagaattgtccctgctggcccagaacaagcagagctcgaagctcgcggccaagtggcccaccaagctggtgaagaactgctttctccccctaagagaatatttcaagtatttttcaacagaactcacttcctctttatctagcggcaatagtaacgctaacagccgcgggccgagcttcagcagcggcctggtgccgttaagcttgcgcggcagccatatgaaccatgaccaggaatttgaccccccaaaggtttacccacctgtgccagctgagaagaggaagcccatccgcgtgctgtctctctttgatgggattgctacagggctcctggtgctgaaggacctgggcatccaagtggaccgctacattgcctccgaggtgtgtgaggactccatcacggtgggcatggtgcggcaccagggaaagatcatgtacgtcggggacgtccgcagcgtcacacagaagcatatccaggagtggggcccattcgacctggtgattggaggcagtccctgcaatgacctctccattgtcaaccctgcccgcaagggactttatgagggtactggccgcctcttctttgagttctaccgcctcctgcatgatgcgcggcccaaggagggagatgatcgccccttcttctggctctttgagaatgtggtggccatgggcgttagtgacaagagggacatctcgcgatttcttgagtctaaccccgtgatgattgacgccaaagaagtgtctgctgcacacagggcccgttacttctggggtaaccttcctggcatgaacaggcctttggcatccactgtgaatgataagctggagctgcaagagtgtctggagcacggcagaatagccaagttcagcaaagtgaggaccattaccaccaggtcaaactctataaagcagggcaaagaccagcatttccccgtcttcatgaacgagaaggaggacatcctgtggtgcactgaaatggaaagggtgtttggcttccccgtccactacacagacgtctccaacatgagccgcttggcgaggcagagactgctgggccgatcgtggagcgtgccggtcatccgccacctcttcgctccgctgaaggaatattttgcttgtgtgctcgaggctactaacttcagcctgctgaagcaggctggagacgtggaggagaaccctggacctatgcattaatgagatcccaagcacgcagcaatgcagctcaaaacgcttagcctagccacacccccacgggaaacagcagtgattaacctttagcaataaacgaaagtttaactaagctatactaaccccagggttggtcaatttcgtgccagccacaccctggtactgcatgcacgcaatgctagctgcccctttcccgtcctgggcaccccgagtctcccccgaccccgggtcccaggtatgctcccacctccacctgccccactcaccacctctgctagttccagacacctccgagacgaggaaaaaaaaaaaaaaaaaaaaaaaaaaaaaaaaaaaaaaaaaaaaaaaaaaaaaaaaaaaaaaaaaaaaaaaaaaaaaaaaaaaaaaaaaaaaaaaaaaaaaaaaaaaaaaaaaaaaaaaaaaaaaaaaaaaaaaaaaaaaaaaaaaaaaaaaaaaaaaaaaaaaaaaaaaaaaaaaaaaaaaaaaaaaaaaaaaaaaaaaaaaaaaaaaaaaaaaaaaaaaaaaaaaaaaaaaaaaaaaaaaaaaaaaaaaaaaaaaaaaaaaaaaaaaaaaaaaaaaaaaaaaaaaaaaaaaaaaaaaaaaaaaaaaaaaaaaaaaaaaaaaaaaaaaaaaaaaaaaaaaaaaaaaaaaaaaaaaaaaaaaaaaaaaaaaaaaaaaaaaaaaaaaaaaaaaaaccgtcttcaagctttctagaaattcactggccgtcgttttacaacgtcgtgactgggaaaaccctggcgttacccaacttaatcgccttgcagcacatccccctttcgccagctggcgtaatagcgaagaggcccgcaccgatcgcccttcccaacagttgcgcagcctgaatggcgaatggcgcctgatgcggtattttctccttacgcatctgtgcggtatttcacaccgcatatggtgcactctcagtacaatctgctctgatgccgcatagttaagccagccccgacacccgccaacacccgctgacgcgccctgacgggcttgtctgctcccggcatccgcttacagacaagctgtgaccgtctccgggagctgcatgtgtcagaggttttcaccgtcatcaccgaaacgcgcgagacgaaagggcctcgtgatacgcctatttttataggttaatgtcatgataataatggtttcttagacgtcaggtggcacttttcggggaaatgtgcgcggaacccctatttgtttatttttctaaatacattcaaatatgtatccgctcatgagacaataaccctgataaatgcttcaataatattgaaaaaggaagagtatgagtattcaacatttccgtgtcgcccttattcccttttttgcggcattttgccttcctgtttttgctcacccagaaacgctggtgaaagtaaaagatgctgaagatcagttgggtgcacgagtgggttacatcgaactggatctcaacagcggtaagatccttgagagttttcgccccgaagaacgttttccaatgatgagcacttttaaagttctgctatgtggcgcggtattatcccgtattgacgccgggcaagagcaactcggtcgccgcatacactattctcagaatgacttggttgagtactcaccagtcacagaaaagcatcttacggatggcatgacagtaagagaattatgcagtgctgccataaccatgagtgataacactgcggccaacttacttctgacaacgatcggaggaccgaaggagctaaccgcttttttgcacaacatgggggatcatgtaactcgccttgatcgttgggaaccggagctgaatgaagccataccaaacgacgagcgtgacaccacgatgcctgtagcaatggcaacaacgttgcgcaaactattaactggcgaactacttactctagcttcccggcaacaattaatagactggatggaggcggataaagttgcaggaccacttctgcgctcggcccttccggctggctggtttattgctgataaatctggagccggtgagcgtgggtctcgcggtatcattgcagcactggggccagatggtaagccctcccgtatcgtagttatctacacgacggggagtcaggcaactatggatgaacgaaatagacagatcgctgagataggtgcctcactgattaagcattggtaactgtcagaccaagtttactcatatatactttagattgatttaaaacttcatttttaatttaaaaggatctaggtgaagatcctttttgataatctcatgaccaaaatcccttaacgtgagttttcgttccactgagcgtcagaccccgtagaaaagatcaaaggatcttcttgagatcctttttttctgcgcgtaatctgctgcttgcaaacaaaaaaaccaccgctaccagcggtggtttgtttgccggatcaagagctaccaactctttttccgaaggtaactggcttcagcagagcgcagataccaaatactgttcttctagtgtagccgtagttaggccaccacttcaagaactctgtagcaccgcctacatacctcgctctgctaatcctgttaccagtggctgctgccagtggcgataagtcgtgtcttaccgggttggactcaagacgatagttaccggataaggcgcagcggtcgggctgaacggggggttcgtgcacacagcccagcttggagcgaacgacctacaccgaactgagatacctacagcgtgagctatgagaaagcgccacgcttcccgaagggagaaaggcggacaggtatccggtaagcggcagggtcggaacaggagagcgcacgagggagcttccagggggaaacgcctggtatctttatagtcctgtcgggtttcgccacctctgacttgagcgtcgatttttgtgatgctcgtcaggggggcggagcctatggaaaaacgccagcaacgcggcctttttacggttcctggccttttgctggccttttgctcacatgttctttcctgcgttatcccctgattctgtggataaccgtattaccgcctttgagtgagctgataccgctcgccgcagccgaacgaccgagcgcagcgagtcagtgagcgaggaagcggaagagcgcccaatacgcaaaccgcctctccccgcgcgttggccgattcattaatgcagctggcacgacaggtttcccgactggaaagcgggcagtgagcgcaacgcaattaatgtgagttagctcactcattaggcaccccaggctttacactttatgcttccggctcgtatgttgtgtggaattgtgagcggataacaatttcacacaggaaacagctatgaccatgattacgcctctagaaagctttaatacgactcactataaggactcactatttgttttcgcgcccagttgcaaaaagtgtcgacatttgcttctgacacaactgtgttcactagcaacctcaaacagacacctta

SEQ ID NO: 150 - DNA, 10095 bp, synthetic construct
  misc_feature 1..10095: note = V32 DNA
  source 1..10095: mol_type = other DNA
atcgtgctgaccctgacactgtttgaggacagagagatgatcgaggaacggctgaaaacctatgcccacctgttcgacgacaaagtgatgaagcagctgaagcggcggagatacaccggctggggcaggctgagccggaagctgatcaacggcatccgggacaagcagtccggcaagacaatcctggatttcctgaagtccgacggcttcgccaacagaaacttcatgcagctgatccacgacgacagcctgacctttaaagaggacatccagaaagcccaggtgtccggccagggcgatagcctgcacgagcacattgccaatctggccggcagccccgccattaagaagggcatcctgcagacagtgaaggtggtggacgagctcgtgaaagtgatgggccggcacaagcccgagaacatcgtgatcgaaatggccagagagaaccagaccacccagaagggacagaagaacagccgcgagagaatgaagcggatcgaagagggcatcaaagagctgggcagccagatcctgaaagaacaccccgtggaaaacacccagctgcagaacgagaagctgtacctgtactacctgcagaatgggcgggatatgtacgtggaccaggaactggacatcaaccggctgtccgactacgatgtggacgctatcgtgcctcagagctttctgaaggacgactccatcgataacaaagtgctgactcggagcgacaagaaccggggcaagagcgacaacgtgccctccgaagaggtcgtgaagaagatgaagaactactggcgccagctgctgaatgccaagctgattacccagaggaagttcgacaatctgaccaaggccgagagaggcggcctgagcgaactggataaggccggcttcatcaagagacagctggtggaaacccggcagatcacaaagcacgtggcacagatcctggactcccggatgaacactaagtacgacgagaacgacaaactgatccgggaagtgaaagtgatcaccctgaagtccaagctggtgtccgatttccggaaggatttccagttttacaaagtgcgcgagatcaacaactaccaccacgcccacgacgcctacctgaacgccgtcgtgggaaccgccctgatcaaaaagtaccctaagctggaaagcgagttcgtgtacggcgactacaaggtgtacgacgtgcggaagatgatcgccaagagcgagcaggaaatcggcaaggctaccgccaagtacttcttctacagcaacatcatgaactttttcaagaccgagattaccctggccaacggcgagatccggaagcggcctctgatcgagacaaacggcgaaacaggcgagatcgtgtgggataagggccgggactttgccaccgtgcggaaagtgctgtctatgccccaagtgaatatcgtgaaaaagaccgaggtgcagacaggcggcttcagcaaagagtctatcctgcccaagaggaacagcgacaagctgatcgccagaaagaaggactgggaccctaagaagtacggcggcttcgacagccccaccgtggcctattctgtgctggtggtggccaaagtggaaaagggcaagtccaagaaactgaagagtgtgaaagagctgctggggatcaccatcatggaaagaagcagcttcgagaagaatcccatcgactttctggaagccaagggctacaaagaagtgaaaaaggacctgatcatcaagctgcctaagtactccctgttcgagctggaaaacggccggaagagaatgctggcctctgccggcgaactgcagaagggaaacgaactggccctgccctccaaatatgtgaacttcctgtacctggccagccactatgagaagctgaagggctcccccgaggataatgagcagaaacagctgtttgtggaacagcacaaacactacctggacgagatcatcgagcagatcagcgagttctccaagagagtgatcctggccgacgctaatctggacaaggtgctgagcgcctacaacaagcacagagacaagcctatcagagagcaggccgagaatatcatccacctgtttaccctgaccaatctgggagcccctgccgccttcaagtactttgacaccaccatcgaccggaagaggtacaccagcaccaaagaggtgctggacgccaccctgatccaccagagcatcaccggcctgtacgagacacggatcgacctgtctcagctgggaggcgacgcctatccctatgacgtgcccgattatgccagcctgggcagcggctcccccaagaaaaaacgcaaggtggaagatcctaagaaaaagcggaaagtggacggcggagggccgagctctggcgcacccccaccaagtggagggtctcctgccgggtccccaacatctactgaagaaggcaccagcgaatccgcaacgcccgagtcaggccctggtacctccacagaaccatctgaaggtagtgcgcctggttccccagctggaagccctacttccaccgaagaaggcacgtcaaccgaaccaagtgaaggatctgcccctgggaccagcactgaaccatctgagggcagcggcagcgagacccccggtaccagcgagagcgccacccccgagagcatgttcgaaaccgtgcctgtgtggaggagacagccagtccgggtgctgtccctttttgaagacatcaagaaagagctgacgagtttgggctttttggaaagtggttctgacccgggacaactgaagcatgtggttgatgtcacagacacagtgaggaaggatgtggaggagtggggacccttcgatcttgtgtacggcgccacacctcccctgggccacacctgtgaccgtcctcccagctggtacctgttccagttccaccggctcctgcagtacgcacggcccaagccaggcagccccaggcccttcttctggatgttcgtggacaatctggtgctgaacaaggaagacctggacgtcgcatctcgcttcctggagatggagccagtcaccatcccagatgtccacggcggatccttgcagaatgctgtccgcgtgtggagcaacatcccagccataaggagcagcaggcactgggctctggtttcggaagaagaattgtccctgctggcccagaacaagcagagctcgaagctcgcggccaagtggcccaccaagctggtgaagaactgctttctccccctaagagaatatttcaagtatttttcaacagaactcacttcctctttatctagcggcaatagtaacgctaacagccgcgggccgagcttcagcagcggcctggtgccgttaagcttgcgcggcagccatatgaaccatgaccaggaatttgaccccccaaaggtttacccacctgtgccagctgagaagaggaagcccatccgcgtgctgtctctctttgatgggattgctacagggctcctggtgctgaaggacctgggcatccaagtggaccgctacattgcctccgaggtgtgtgaggactccatcacggtgggcatggtgcggcaccagggaaagatcatgtacgtcggggacgtccgcagcgtcacacagaagcatatccaggagtggggcccattcgacctggtgattggaggcagtccctgcaatgacctctccattgtcaaccctgcccgcaagggactttatgagggtactggccgcctcttctttgagttctaccgcctcctgcatgatgcgcggcccaaggagggagatgatcgccccttcttctggctctttgagaatgtggtggccatgggcgttagtgacaagagggacatctcgcgatttcttgagtctaaccccgtgatgattgacgccaaagaagtgtctgctgcacacagggcccgttacttctggggtaaccttcctggcatgaacaggcctttggcatccactgtgaatgataagctggagctgcaagagtgtctggagcacggcagaatagccaagttcagcaaagtgaggaccattaccaccaggtcaaactctataaagcagggcaaagaccagcatttccccgtcttcatgaacgagaaggaggacatcctgtggtgcactgaaatggaaagggtgtttggcttccccgtccactacacagacgtctccaacatgagccgcttggcgaggcagagactgctgggccgatcgtggagcgtgccggtcatccgccacctcttcgctccgctgaaggaatattttgcttgtgtgagcggcagcgagacccccggtaccagcgagagcgctacacccgaatccggccccggcagccccgccggcagccctacaagcaccgaggagggcacctccgaatccgccacccctgagagcggacccggcagcgagcctgccacaagcggcagcgagacacctggaacaagcgagagcgccacacctgaaagcggccccggaacatccaccgagcctagcgagggcagcgcccctggcacaagcacagagccttccgagagcgccacccccgagagccggacactggtgaccttcaaggatgtatttgtggacttcaccagggaggagtggaagctgctggacactgctcagcagatcgtgtacagaaatgtgatgctggagaactataagaacctggtttccttgggttatcagcttactaagccagatgtgatcctccggttggagaagggagaagagcccctcgagtgataatagggatcccaagcacgcagcaatgcagctcaaaacgcttagcctagccacacccccacgggaaacagcagtgattaacctttagcaataaacgaaagtttaactaagctatactaaccccagggttggtcaatttcgtgccagccacaccctggtactgcatgcacgcaatgctagctgcccctttcccgtcctgggcaccccgagtctcccccgaccccgggtcccaggtatgctcccacctccacctgccccactcaccacctctgctagttccagacacctccgaagatggaaaaaaaaaaaaaaaaaaaaaaaaaaaaaaaaaaaaaaaaaaaaaaaaaaaaaaaaaaaaaaaaaaaaaaaaaaaaaaaaaaaaaaaaaaaaaaaaaaaaaaaaaaaaaaaaaaaaaaaaaaaaaaaaaaaaaaaaaaaaaaaaaaaaaaaaaaaaaaaaaaaaaaaaaaaaaaaaaaaaaaaaaaaaaaaaaaaaaaaaaaaaaaaaaaaaaaaaaaaaaaaaaaaaaaaaaaaaaaaaaaaaaaaaaaaaaaaaaaaaaaaaaaaaaaaaaaaaaaaaaaaaaaaaaaaaaaaaaaaaaaaaaaaaaaaaaaaaaaaaaaaaaaaaaaaaaaaaaaaaaaaaaaaaaaaaaaaaaaaaaaaaaaaaaaaaaaaaaaaaaaaaaaaaaaaaaaccgtcttcaagctttctagaaattcactggccgtcgttttacaacgtcgtgactgggaaaaccctggcgttacccaacttaatcgccttgcagcacatccccctttcgccagctggcgtaatagcgaagaggcccgcaccgatcgcccttcccaacagttgcgcagcctgaatggcgaatggcgcctgatgcggtattttctccttacgcatctgtgcggtatttcacaccgcatatggtgcactctcagtacaatctgctctgatgccgcatagttaagccagccccgacacccgccaacacccgctgacgcgccctgacgggcttgtctgctcccggcatccgcttacagacaagctgtgaccgtctccgggagctgcatgtgtcagaggttttcaccgtcatcaccgaaacgcgcgagacgaaagggcctcgtgatacgcctatttttataggttaatgtcatgataataatggtttcttagacgtcaggtggcacttttcggggaaatgtgcgcggaacccctatttgtttatttttctaaatacattcaaatatgtatccgctcatgagacaataaccctgataaatgcttcaataatattgaaaaaggaagagtatgagtattcaacatttccgtgtcgcccttattcccttttttgcggcattttgccttcctgtttttgctcacccagaaacgctggtgaaagtaaaagatgctgaagatcagttgggtgcacgagtgggttacatcgaactggatctcaacagcggtaagatccttgagagttttcgccccgaagaacgttttccaatgatgagcacttttaaagttctgctatgtggcgcggtattatcccgtattgacgccgggcaagagcaactcggtcgccgcatacactattctcagaatgacttggttgagtactcaccagtcacagaaaagcatcttacggatggcatgacagtaagagaattatgcagtgctgccataaccatgagtgataacactgcggccaacttacttctgacaacgatcggaggaccgaaggagctaaccgcttttttgcacaacatgggggatcatgtaactcgccttgatcgttgggaaccggagctgaatgaagccataccaaacgacgagcgtgacaccacgatgcctgtagcaatggcaacaacgttgcgcaaactattaactggcgaactacttactctagcttcccggcaacaattaatagactggatggaggcggataaagttgcaggaccacttctgcgctcggcccttccggctggctggtttattgctgataaatctggagccggtgagcgtgggtcacgcggtatcattgcagcactggggccagatggtaagccctcccgtatcgtagttatctacacgacggggagtcaggcaactatggatgaacgaaatagacagatcgctgagataggtgcctcactgattaagcattggtaactgtcagaccaagtttactcatatatactttagattgatttaaaacttcatttttaatttaaaaggatctaggtgaagatcctttttgataatctcatgaccaaaatcccttaacgtgagttttcgttccactgagcgtcagaccccgtagaaaagatcaaaggatcttcttgagatcctttttttctgcgcgtaatctgctgcttgcaaacaaaaaaaccaccgctaccagcggtggtttgtttgccggatcaagagctaccaactctttttccgaaggtaactggcttcagcagagcgcagataccaaatactgttcttctagtgtagccgtagttaggccaccacttcaagaactctgtagcaccgcctacatacctcgctctgctaatcctgttaccagtggctgctgccagtggcgataagtcgtgtcttaccgggttggactcaagacgatagttaccggataaggcgcagcggtcgggctgaacggggggttcgtgcacacagcccagcttggagcgaacgacctacaccgaactgagatacctacagcgtgagctatgagaaagcgccacgcttcccgaagggagaaaggcggacaggtatccggtaagcggcagggtcggaacaggagagcgcacgagggagcttccagggggaaacgcctggtatctttatagtcctgtcgggtttcgccacctctgacttgagcgtcgatttttgtgatgctcgtcaggggggcggagcctatggaaaaacgccagcaacgcggcctttttacggttcctggccttttgctggccttttgctcacatgttctttcctgcgttatcccctgattctgtggataaccgtattaccgcctttgagtgagctgataccgctcgccgcagccgaacgaccgagcgcagcgagtcagtgagcgaggaagcggaagagcgcccaatacgcaaaccgcctctccccgcgcgttggccgattcattaatgcagctggcacgacaggtttcccgactggaaagcgggcagtgagcgcaacgcaattaatgtgagttagctcactcattaggcaccccaggctttacactttatgcttccggctcgtatgttgtgtggaattgtgagcggataacaatttcacacaggaaacagctatgaccatgattacgcctctagaaagctttaatacgactcactataaggactcactatttgttttcgcgcccagttgcaaaaagtgtcgacatttgcttctgacacaactgtgttcactagcaacctcaaacagacaccgccaccatggtccctgctgctaagagagtgaaactggatggatccgacaagaagtacagcatcggcctggccatcggcaccaactctgtgggctgggccgtgatcaccgacgagtacaaggtgcccagcaagaaattcaaggtgctgggcaacaccgaccggcacagcatcaagaagaacctgatcggcgccctgctgttcgacagcggagaaacagccgaggccacccggctgaagagaaccgccagaagaagatacaccagacggaagaaccggatctgctatctgcaagagatcttcagcaacgagatggccaaggtggacgacagcttcttccacagactggaagagtccttcctggtggaagaggataagaagcacgagcggcaccccatcttcggcaacatcgtggacgaggtggcctaccacgagaagtaccccaccatctaccacctgagaaagaaactggtggacagcaccgacaaggccgacctgcggctgatctatctggccctggcccacatgatcaagttccggggccacttcctgatcgagggcgacctgaaccccgacaacagcgacgtggacaagctgttcatccagctggtgcagacctacaaccagctgttcgaggaaaaccccatcaacgccagcggcgtggacgccaaggccatcctgtctgccagactgagcaagagcagacggctggaaaatctgatcgcccagctgcccggcgagaagaagaatggcctgttcggcaacctgattgccctgagcctgggcctgacccccaacttcaagagcaacttcgacctggccgaggatgccaaactgcagctgagcaaggacacctacgacgacgacctggacaacctgctggcccagatcggcgaccagtacgccgacctgtttctggccgccaagaacctgtccgacgccatcctgctgagcgacatcctgagagtgaacaccgagatcaccaaggcccccctgagcgcctctatgatcaagagatacgacgagcaccaccaggacctgaccctgctgaaagctctcgtgcggcagcagctgcctgagaagtacaaagagattttcttcgaccagagcaagaacggctacgccggctacatcgatggcggagccagccaggaagagttctacaagttcatcaagcccatcctggaaaagatggacggcaccgaggaactgctcgtgaagctgaacagagaggacctgctgcggaagcagcggaccttcgacaacggcagcatcccccaccagatccacctgggagagctgcacgccattctgcggcggcaggaagatttttacccattcctgaaggacaaccgggaaaagatcgagaagatcctgaccttccgcatcccctactacgtgggccctctggccaggggaaacagcagattcgcctggatgaccagaaagagcgaggaaaccatcaccccctggaacttcgaggaagtggtggacaagggcgccagcgcccagagcttcatcgagcggatgaccaacttcgataagaacctgcccaacgagaaggtgctgcccaagcacagcctgctgtacgagtacttcaccgtgtacaacgagctgaccaaagtgaaatacgtgaccgagggaatgagaaagcccgccttcctgagcggcgagcagaaaaaagccatcgtggacctgctgttcaagaccaaccggaaagtgaccgtgaagcagctgaaagaggactacttcaagaaaatcgagtgcttcgactccgtggaaatctccggcgtggaagatcggttcaacgcctccctgggcacataccacgatctgctgaaaattatcaaggacaaggacttcctggacaatgaggaaaacgaggacattctggaagat

SEQ ID NO: 151 - DNA, 10145 bp, synthetic construct
  misc_feature 1..10145: note = V33 DNA
  source 1..10145: mol_type = other DNA
attaagccaccatgccaaaaaagaagagaaaggtaatggacaagaagtacagcatcggcctggccatcggcaccaactctgtgggctgggccgtgatcaccgacgagtacaaggtgcccagcaagaaattcaaggtgctgggcaacaccgaccggcacagcatcaagaagaacctgatcggcgccctgctgttcgacagcggagaaacagccgaggccacccggctgaagagaaccgccagaagaagatacaccagacggaagaaccggatctgctatctgcaagagatcttcagcaacgagatggccaaggtggacgacagcttcttccacagactggaagagtccttcctggtggaagaggataagaagcacgagcggcaccccatcttcggcaacatcgtggacgaggtggcctaccacgagaagtaccccaccatctaccacctgagaaagaaactggtggacagcaccgacaaggccgacctgcggctgatctatctggccctggcccacatgatcaagttccggggccacttcctgatcgagggcgacctgaaccccgacaacagcgacgtggacaagctgttcatccagctggtgcagacctacaaccagctgttcgaggaaaaccccatcaacgccagcggcgtggacgccaaggccatcctgtctgccagactgagcaagagcagacggctggaaaatctgatcgcccagctgcccggcgagaagaagaatggcctgttcggcaacctgattgccctgagcctgggcctgacccccaacttcaagagcaacttcgacctggccgaggatgccaaactgcagctgagcaaggacacctacgacgacgacctggacaacctgctggcccagatcggcgaccagtacgccgacctgtttctggccgccaagaacctgtccgacgccatcctgctgagcgacatcctgagagtgaacaccgagatcaccaaggcccccctgagcgcctctatgatcaagagatacgacgagcaccaccaggacctgaccctgctgaaagctctcgtgcggcagcagctgcctgagaagtacaaagagattttcttcgaccagagcaagaacggctacgccggctacatcgatggcggagccagccaggaagagttctacaagttcatcaagcccatcctggaaaagatggacggcaccgaggaactgctcgtgaagctgaacagagaggacctgctgcggaagcagcggaccttcgacaacggcagcatcccccaccagatccacctgggagagctgcacgccattctgcggcggcaggaagatttttacccattcctgaaggacaaccgggaaaagatcgagaagatcctgaccttccgcatcccctactacgtgggccctctggccaggggaaacagcagattcgcctggatgaccagaaagagcgaggaaaccatcaccccctggaacttcgaggaagtggtggacaagggcgccagcgcccagagcttcatcgagcggatgaccaacttcgataagaacctgcccaacgagaaggtgctgcccaagcacagcctgctgtacgagtacttcaccgtgtacaacgagctgaccaaagtgaaatacgtgaccgagggaatgagaaagcccgccttcctgagcggcgagcagaaaaaagccatcgtggacctgctgttcaagaccaaccggaaagtgaccgtgaagcagctgaaagaggactacttcaagaaaatcgagtgcttcgactccgtggaaatctccggcgtggaagatcggttcaacgcctccctgggcacataccacgatctgctgaaaattatcaaggacaaggacttcctggacaatgaggaaaacgaggacattctggaagatatcgtgctgaccctgacactgtttgaggacagagagatgatcgaggaacggctgaaaacctatgcccacctgttcgacgacaaagtgatgaagcagctgaagcggcggagatacaccggctggggcaggctgagccggaagctgatcaacggcatccgggacaagcagtccggcaagacaatcctggatttcctgaagtccgacggcttcgccaacagaaacttcatgcagctgatccacgacgacagcctgacctttaaagaggacatccagaaagcccaggtgtccggccagggcgatagcctgcacgagcacattgccaatctggccggcagccccgccattaagaagggcatcctgcagacagtgaaggtggtggacgagctcgtgaaagtgatgggccggcacaagcccgagaacatcgtgatcgaaatggccagagagaaccagaccacccagaagggacagaagaacagccgcgagagaatgaagcggatcgaagagggcatcaaagagctgggcagccagatcctgaaagaacaccccgtggaaaacacccagctgcagaacgagaagctgtacctgtactacctgcagaatgggcgggatatgtacgtggaccaggaactggacatcaaccggctgtccgactacgatgtggacgctatcgtgcctcagagctttctgaaggacgactccatcgataacaaagtgctgactcggagcgacaagaaccggggcaagagcgacaacgtgccctccgaagaggtcgtgaagaagatgaagaactactggcgccagctgctgaatgccaagctgattacccagaggaagttcgacaatctgaccaaggccgagagaggcggcctgagcgaactggataaggccggcttcatcaagagacagctggtggaaacccggcagatcacaaagcacgtggcacagatcctggactcccggatgaacactaagtacgacgagaacgacaaactgatccgggaagtgaaagtgatcaccctgaagtccaagctggtgtccgatttccggaaggatttccagttttacaaagtgcgcgagatcaacaactaccaccacgcccacgacgcctacctgaacgccgtcgtgggaaccgccctgatcaaaaagtaccctaagctggaaagcgagttcgtgtacggcgactacaaggtgtacgacgtgcggaagatgatcgccaagagcgagcaggaaatcggcaaggctaccgccaagtacttcttctacagcaacatcatgaactttttcaagaccgagattaccctggccaacggcgagatccggaagcggcctctgatcgagacaaacggcgaaacaggcgagatcgtgtgggataagggccgggactttgccaccgtgcggaaagtgctgtctatgccccaagtgaatatcgtgaaaaagaccgaggtgcagacaggcggcttcagcaaagagtctatcctgcccaagaggaacagcgacaagctgatcgccagaaagaaggactgggaccctaagaagtacggcggcttcgacagccccaccgtggcctattctgtgctggtggtggccaaagtggaaaagggcaagtccaagaaactgaagagtgtgaaagagctgctggggatcaccatcatggaaagaagcagcttcgagaagaatcccatcgactttctggaagccaagggctacaaagaagtgaaaaaggacctgatcatcaagctgcctaagtactccctgttcgagctggaaaacggccggaagagaatgctggcctctgccggcgaactgcagaagggaaacgaactggccctgccctccaaatatgtgaacttcctgtacctggccagccactatgagaagctgaagggctcccccgaggataatgagcagaaacagctgtttgtggaacagcacaaacactacctggacgagatcatcgagcagatcagcgagttctccaagagagtgatcctggccgacgctaatctggacaaggtgctgagcgcctacaacaagcacagagacaagcctatcagagagcaggccgagaatatcatccacctgtttaccctgaccaatctgggagcccctgccgccttcaagtactttgacaccaccatcgaccggaagaggtacaccagcaccaaagaggtgctggacgccaccctgatccaccagagcatcaccggcctgtacgagacacggatcgacctgtctcagctgggaggcgacgcctatccctatgacgtgcccgattatgccagcctgggcagcggctcccccaagaaaaaacgcaaggtggaagatcctaagaaaaagcggaaagtggacggcggagggccgagctctggcgcacccccaccaagtggagggtctcctgccgggtccccaacatctactgaagaaggcaccagcgaatccgcaacgcccgagtcaggccctggtacctccacagaaccatctgaaggtagtgcgcctggttccccagctggaagccctacttccaccgaagaaggcacgtcaaccgaaccaagtgaaggatctgcccctgggaccagcactgaaccatctgagatgaacaattcccagggaagagtgaccttcgaggacgtgaccgtgaacttcacccaaggcgagtggcagagactgaaccccgagcagagaaacctgtaccgggacgtgatgctggaaaactacagcaacctggtgtccgtcggccagggcgagacaacaaagcctgacgtgatcctgcggctggaacagggcaaagagccttggctggaagaggaagaggtgctcggatctggcagagccgagaagaatggcgatatcggcggacagatctggaagccaaaggatgtgaaagagagtctcagcggcagcgagacccccggtaccagcgagggcggccctagcagcggcgcccctccccctagcggcggcagccctgccggatcccctacaagcaccgaagaaggcacaagcgagtccgctacccctgagtccggccctggcacctccacagagcctagcgagggatccgctcctggatcccctgccggaagccctacctccaccgaggagggcacaagcaccgagccttccgagggcagcgcccccggaacaagcaccgaacctagcgagagcgccacccccgagagcggatccaaccatgaccaggaatttgaccccccaaaggtttacccacctgtgccagctgagaagaggaagcccatccgcgtgctgtctctctttgatgggattgctacagggctcctggtgctgaaggacctgggcatccaagtggaccgctacattgcctccgaggtgtgtgaggactccatcacggtgggcatggtgcggcaccagggaaagatcatgtacgtcggggacgtccgcagcgtcacacagaagcatatccaggagtggggcccattcgacctggtgattggaggcagtccctgcaatgacctctccattgtcaaccctgcccgcaagggactttatgagggtactggccgcctcttctttgagttctaccgcctcctgcatgatgcgcggcccaaggagggagatgatcgccccttcttctggctctttgagaatgtggtggccatgggcgttagtgacaagagggacatctcgcgatttcttgagtctaaccccgtgatgattgacgccaaagaagtgtctgctgcacacagggcccgttacttctggggtaaccttcctggcatgaacaggcctttggcatccactgtgaatgataagctggagctgcaagagtgtctggagcacggcagaatagccaagttcagcaaagtgaggaccattaccaccaggtcaaactctataaagcagggcaaagaccagcatttccccgtgttcatgaacgagaaggaggacatcctgtggtgcactgaaatggaaagggtgtttggcttccccgtccactacacagacgtctccaacatgagccgcttggcgaggcagagactgctgggccgatcgtggagcgtgccggtcatccgccacctcttcgctccgctgaaggaatattttgcttgtgtgtctagcggcaatagtaacgctaacagccgcgggccgagcttcagcagcggcctggtgccgttaagcttgcgcggcagccatatgttcgaaaccgtgcctgtgtggaggagacagccagtccgggtgctgtccctttttgaagacatcaagaaagagctgacgagtttgggctttttggaaagtggttctgacccgggacaactgaagcatgtggttgatgtcacagacacagtgaggaaggatgtggaggagtggggacccttcgatcttgtgtacggcgccacacctcccctgggccacacctgtgaccgtcctcccagctggtacctgttccagttccaccggctcctgcagtacgcacggcccaagccaggcagccccaggcccttcttctggatgttcgtggacaatctggtgctgaacaaggaagacctggacgtcgcatctcgcttcctggagatggagccagtcaccatcccagatgtccacggcggatccttgcagaatgctgtccgcgtgtggagcaacatcccagccataaggagcagcaggcactgggctctggtttcggaagaagaattgtccctgctggcccagaacaagcagagctcgaagctcgcggccaagtggcccaccaagctggtgaagaactgctttctccccctaagagaatatttcaagtatttttcaatgcattaatgagatcccaagcacgcagcaatgcagctcaaaacgcttagcctagccacacccccacgggaaacagcagtgattaacctttagcaataaacgaaagtttaactaagctatactaaccccagggttggtcaatttcgtgccagccacaccctggtactgcatgcacgcaatgctagctgcccctttcccgtcctgggcaccccgagtctcccccgaccccgggtcccaggtatgctcccacctccacctgccccactcaccacctctgctagttccagacacctccgagacgaggaaaaaaaaaaaaaaaaaaaaaaaaaaaaaaaaaaaaaaaaaaaaaaaaaaaaaaaaaaaaaaaaaaaaaaaaaaaaaaaaaaaaaaaaaaaaaaaaaaaaaaaaaaaaaaaaaaaaaaaaaaaaaaaaaaaaaaaaaaaaaaaaaaaaaaaaaaaaaaaaaaaaaaaaaaaaaaaaaaaaaaaaaaaaaaaaaaaaaaaaaaaaaaaaaaaaaaaaaaaaaaaaaaaaaaaaaaaaaaaaaaaaaaaaaaaaaaaaaaaaaaaaaaaaaaaaaaaaaaaaaaaaaaaaaaaaaaaaaaaaaaaaaaaaaaaaaaaaaaaaaaaaaaaaaaaaaaaaaaaaaaaaaaaaaaaaaaaaaaaaaaaaaaaaaaaaaaaaaaaaaaaaaaaaaaaaaaccgtcttcaagctttctagaaattcactggccgtcgttttacaacgtcgtgactgggaaaaccctggcgttacccaacttaatcgccttgcagcacatccccctttcgccagctggcgtaatagcgaagaggcccgcaccgatcgcccttcccaacagttgcgcagcctgaatggcgaatggcgcctgatgcggtattttctccttacgcatctgtgcggtatttcacaccgcatatggtgcactctcagtacaatctgctctgatgccgcatagttaagccagccccgacacccgccaacacccgctgacgcgccctgacgggcttgtctgctcccggcatccgcttacagacaagctgtgaccgtctccgggagctgcatgtgtcagaggttttcaccgtcatcaccgaaacgcgcgagacgaaagggcctcgtgatacgcctatttttataggttaatgtcatgataataatggtttcttagacgtcaggtggcacttttcggggaaatgtgcgcggaacccctatttgtttatttttctaaatacattcaaatatgtatccgctcatgagacaataaccctgataaatgcttcaataatattgaaaaaggaagagtatgagtattcaacatttccgtgtcgcccttattcccttttttgcggcattttgccttcctgtttttgctcacccagaaacgctggtgaaagtaaaagatgctgaagatcagttgggtgcacgagtgggttacatcgaactggatctcaacagcggtaagatccttgagagttttcgccccgaagaacgttttccaatgatgagcacttttaaagttctgctatgtggcgcggtattatcccgtattgacgccgggcaagagcaactcggtcgccgcatacactattctcagaatgacttggttgagtactcaccagtcacagaaaagcatcttacggatggcatgacagtaagagaattatgcagtgctgccataaccatgagtgataacactgcggccaacttacttctgacaacgatcggaggaccgaaggagctaaccgcttttttgcacaacatgggggatcatgtaactcgccttgatcgttgggaaccggagctgaatgaagccataccaaacgacgagcgtgacaccacgatgcctgtagcaatggcaacaacgttgcgcaaactattaactggcgaactacttactctagcttcccggcaacaattaatagactggatggaggcggataaagttgcaggaccacttctgcgctcggcccttccggctggctggtttattgctgataaatctggagccggtgagcgtgggtctcgcggtatcattgcagcactggggccagatggtaagccctcccgtatcgtagttatctacacgacggggagtcaggcaactatggatgaacgaaatagacagatcgctgagataggtgcctcactgattaagcattggtaactgtcagaccaagtttactcatatatactttagattgatttaaaacttcatttttaatttaaaaggatctaggtgaagatcctttttgataatctcatgaccaaaatcccttaacgtgagttttcgttccactgagcgtcagaccccgtagaaaagatcaaaggatcttcttgagatcctttttttctgcgcgtaatctgctgcttgcaaacaaaaaaaccaccgctaccagcggtggtttgtttgccggatcaagagctaccaactctttttccgaaggtaactggcttcagcagagcgcagataccaaatactgttcttctagtgtagccgtagttaggccaccacttcaagaactctgtagcaccgcctacatacctcgctctgctaatcctgttaccagtggctgctgccagtggcgataagtcgtgtcttaccgggttggactcaagacgatagttaccggataaggcgcagcggtcgggctgaacggggggttcgtgcacacagcccagcttggagcgaacgacctacaccgaactgagatacctacagcgtgagctatgagaaagcgccacgcttcccgaagggagaaaggcggacaggtatccggtaagcggcagggtcggaacaggagagcgcacgagggagcttccagggggaaacgcctggtatctttatagtcctgtcgggtttcgccacctctgacttgagcgtcgatttttgtgatgctcgtcaggggggcggagcctatggaaaaacgccagcaacgcggcctttttacggttcctggccttttgctggccttttgctcacatgttctttcctgcgttatcccctgattctgtggataaccgtattaccgcctttgagtgagctgataccgctcgccgcagccgaacgaccgagcgcagcgagtcagtgagcgaggaagcggaagagcgcccaatacgcaaaccgcctctccccgcgcgttggccgattcattaatgcagctggcacgacaggtttcccgactggaaagcgggcagtgagcgcaacgcaattaatgtgagttagctcactcattaggcaccccaggctttacactttatgcttccggctcgtatgttgtgtggaattgtgagcggataacaatttcacacaggaaacagctatgaccatgattacgcctctagaaagctttaatacgactcactataaggactcactatttgttttcgcgcccagttgcaaaaagtgtcgacatttgcttctgacacaactgtgttcactagcaacctcaaacagacacctta

SEQ ID NO: 152 - DNA, 10757 bp, synthetic construct
  misc_feature 1..10757: note = V34 DNA
  source 1..10757: mol_type = other DNA
attaagccaccatgccaaaaaagaagagaaaggtaatggacaagaagtacagcatcggcctggccatcggcaccaactctgtgggctgggccgtgatcaccgacgagtacaaggtgcccagcaagaaattcaaggtgctgggcaacaccgaccggcacagcatcaagaagaacctgatcggcgccctgctgttcgacagcggagaaacagccgaggccacccggctgaagagaaccgccagaagaagatacaccagacggaagaaccggatctgctatctgcaagagatcttcagcaacgagatggccaaggtggacgacagcttcttccacagactggaagagtccttcctggtggaagaggataagaagcacgagcggcaccccatcttcggcaacatcgtggacgaggtggcctaccacgagaagtaccccaccatctaccacctgagaaagaaactggtggacagcaccgacaaggccgacctgcggctgatctatctggccctggcccacatgatcaagttccggggccacttcctgatcgagggcgacctgaaccccgacaacagcgacgtggacaagctgttcatccagctggtgcagacctacaaccagctgttcgaggaaaaccccatcaacgccagcggcgtggacgccaaggccatcctgtctgccagactgagcaagagcagacggctggaaaatctgatcgcccagctgcccggcgagaagaagaatggcctgttcggcaacctgattgccctgagcctgggcctgacccccaacttcaagagcaacttcgacctggccgaggatgccaaactgcagctgagcaaggacacctacgacgacgacctggacaacctgctggcccagatcggcgaccagtacgccgacctgtttctggccgccaagaacctgtccgacgccatcctgctgagcgacatcctgagagtgaacaccgagatcaccaaggcccccctgagcgcctctatgatcaagagatacgacgagcaccaccaggacctgaccctgctgaaagctctcgtgcggcagcagctgcctgagaagtacaaagagattttcttcgaccagagcaagaacggctacgccggctacatcgatggcggagccagccaggaagagttctacaagttcatcaagcccatcctggaaaagatggacggcaccgaggaactgctcgtgaagctgaacagagaggacctgctgcggaagcagcggaccttcgacaacggcagcatcccccaccagatccacctgggagagctgcacgccattctgcggcggcaggaagatttttacccattcctgaaggacaaccgggaaaagatcgagaagatcctgaccttccgcatcccctactacgtgggccctctggccaggggaaacagcagattcgcctggatgaccagaaagagcgaggaaaccatcaccccctggaacttcgaggaagtggtggacaagggcgccagcgcccagagcttcatcgagcggatgaccaacttcgataagaacctgcccaacgagaaggtgctgcccaagcacagcctgctgtacgagtacttcaccgtgtacaacgagctgaccaaagtgaaatacgtgaccgagggaatgagaaagcccgccttcctgagcggcgagcagaaaaaagccatcgtggacctgctgttcaagaccaaccggaaagtgaccgtgaagcagctgaaagaggactacttcaagaaaatcgagtgcttcgactccgtggaaatctccggcgtggaagatcggttcaacgcctccctgggcacataccacgatctgctgaaaattatcaaggacaaggacttcctggacaatgaggaaaacgaggacattctggaagatatcgtgctgaccctgacactgtttgaggacagagagatgatcgaggaacggctgaaaacctatgcccacctgttcgacgacaaagtgatgaagcagctgaagcggcggagatacaccggctggggcaggctgagccggaagctgatcaacggcatccgggacaagcagtccggcaagacaatcctggatttcctgaagtccgacggcttcgccaacagaaacttcatgcagctgatccacgacgacagcctgacctttaaagaggacatccagaaagcccaggtgtccggccagggcgatagcctgcacgagcacattgccaatctggccggcagccccgccattaagaagggcatcctgcagacagtgaaggtggtggacgagctcgtgaaagtgatgggccggcacaagcccgagaacatcgtgatcgaaatggccagagagaaccagaccacccagaagggacagaagaacagccgcgagagaatgaagcggatcgaagagggcatcaaagagctgggcagccagatcctgaaagaacaccccgtggaaaacacccagctgcagaacgagaagctgtacctgtactacctgcagaatgggcgggatatgtacgtggaccaggaactggacatcaaccggctgtccgactacgatgtggacgctatcgtgcctcagagctttctgaaggacgactccatcgataacaaagtgctgactcggagcgacaagaaccggggcaagagcgacaacgtgccctccgaagaggtcgtgaagaagatgaagaactactggcgccagctgctgaatgccaagctgattacccagaggaagttcgacaatctgaccaaggccgagagaggcggcctgagcgaactggataaggccggcttcatcaagagacagctggtggaaacccggcagatcacaaagcacgtggcacagatcctggactcccggatgaacactaagtacgacgagaacgacaaactgatccgggaagtgaaagtgatcaccctgaagtccaagctggtgtccgatttccggaaggatttccagttttacaaagtgcgcgagatcaacaactaccaccacgcccacgacgcctacctgaacgccgtcgtgggaaccgccctgatcaaaaagtaccctaagctggaaagcgagttcgtgtacggcgactacaaggtgtacgacgtgcggaagatgatcgccaagagcgagcaggaaatcggcaaggctaccgccaagtacttcttctacagcaacatcatgaactttttcaagaccgagattaccctggccaacggcgagatccggaagcggcctctgatcgagacaaacggcgaaacaggcgagatcgtgtgggataagggccgggactttgccaccgtgcggaaagtgctgtctatgccccaagtgaatatcgtgaaaaagaccgaggtgcagacaggcggcttcagcaaagagtctatcctgcccaagaggaacagcgacaagctgatcgccagaaagaaggactgggaccctaagaagtacggcggcttcgacagccccaccgtggcctattctgtgctggtggtggccaaagtggaaaagggcaagtccaagaaactgaagagtgtgaaagagctgctggggatcaccatcatggaaagaagcagcttcgagaagaatcccatcgactttctggaagccaagggctacaaagaagtgaaaaaggacctgatcatcaagctgcctaagtactccctgttcgagctggaaaacggccggaagagaatgctggcctctgccggcgaactgcagaagggaaacgaactggccctgccctccaaatatgtgaacttcctgtacctggccagccactatgagaagctgaagggctcccccgaggataatgagcagaaacagctgtttgtggaacagcacaaacactacctggacgagatcatcgagcagatcagcgagttctccaagagagtgatcctggccgacgctaatctggacaaggtgctgagcgcctacaacaagcacagagacaagcctatcagagagcaggccgagaatatcatccacctgtttaccctgaccaatctgggagcccctgccgccttcaagtactttgacaccaccatcgaccggaagaggtacaccagcaccaaagaggtgctggacgccaccctgatccaccagagcatcaccggcctgtacgagacacggatcgacctgtctcagctgggaggcgacgcctatccctatgacgtgcccgattatgccagcctgggcagcggctcccccaagaaaaaacgcaaggtggaagatcctaagaaaaagcggaaagtggacggcggagggccgagctctggcgcacccccaccaagtggagggtctcctgccgggtccccaacatctactgaagaaggcaccagcgaatccgcaacgcccgagtcaggccctggtacccatgtgagcgagctgattaaggagaacatgcacatgaagctgtacatggagggcaccgtggacaaccatcacttcaagtgcacatccgagggcgaaggcaagccctacgagggcacccagaccatgagaatcaaggtggtcgagggcggccctctccccttcgccttcgacatcctggctactagcttcctctacggcagcaagaccttcatcaaccacacccagggcatccccgacttcttcaagcagtccttccctgagggcttcacatgggagagagtcaccacatacgaagacgggggcgtgctgaccgctacccaggacaccagcctccaggacggctgcctcatctacaacgtcaagatcagaggggtgaacttcacatccaacggccctgtgatgcagaagaaaacactcggctgggaggccttcaccgaaacgctgtaccccgctgacggcggcctggaaggcagaaacgacatggccctgaagctcgtgggcgggagccatctgatcgcaaacatcaagaccacatatagatccaagaaacccgctaagaacctcaagatgcctggcgtctactatgtggactacagactggaaagaatcaaggaggccaacaacgagacctacgtcgagcagcacgaggtggcagtggccagatactgcgacctccctagcaaactggggcacaagcttaatggatctgcccctgggaccagcactgaaccatctgagatgaacaattcccagggaagagtgaccttcgaggacgtgaccgtgaacttcacccaaggcgagtggcagagactgaaccccgagcagagaaacctgtaccgggacgtgatgctggaaaactacagcaacctggtgtccgtcggccagggcgagacaacaaagcctgacgtgatcctgcggctggaacagggcaaagagccttggctggaagaggaagaggtgctcggatctggcagagccgagaagaatggcgatatcggcggacagatctggaagccaaaggatgtgaaagagagtctcagcggcagcgagacccccggtaccagcgagggcggccctagcagcggcgcccctccccctagcggcggcagccctgccggatcccctacaagcaccgaagaaggcacaagcgagtccgctacccctgagtccggccctggcacctccacagagcctagcgagggatccgctcctggatcccctgccggaagccctacctccaccgaggagggcacaagcaccgagccttccgagggcagcgcccccggaacaagcaccgaacctagcgagagcgccacccccgagagcggatccaaccatgaccaggaatttgaccccccaaaggtttacccacctgtgccagctgagaagaggaagcccatccgcgtgctgtctctctttgatgggattgctacagggctcctggtgctgaaggacctgggcatccaagtggaccgctacattgcctccgaggtgtgtgaggactccatcacggtgggcatggtgcggcaccagggaaagatcatgtacgtcggggacgtccgcagcgtcacacagaagcatatccaggagtggggcccattcgacctggtgattggaggcagtccctgcaatgacctctccattgtcaaccctgcccgcaagggactttatgagggtactggccgcctcttctttgagttctaccgcctcctgcatgatgcgcggcccaaggagggagatgatcgccccttcttctggctctttgagaatgtggtggccatgggcgttagtgacaagagggacatctcgcgatttcttgagtctaaccccgtgatgattgacgccaaagaagtgtctgctgcacacagggcccgttacttctggggtaaccttcctggcatgaacaggcctttggcatccactgtgaatgataagctggagctgcaagagtgtctggagcacggcagaatagccaagttcagcaaagtgaggaccattaccaccaggtcaaactctataaagcagggcaaagaccagcatttccccgtgttcatgaacgagaaggaggacatcctgtggtgcactgaaatggaaagggtgtttggcttccccgtccactacacagacgtctccaacatgagccgcttggcgaggcagagactgctgggccgatcgtggagcgtgccggtcatccgccacctcttcgctccgctgaaggaatattttgcttgtgtgtctagcggcaatagtaacgctaacagccgcgggccgagcttcagcagcggcctggtgccgttaagcttgcgcggcagccatatgttcgaaaccgtgcctgtgtggaggagacagccagtccgggtgctgtccctttttgaagacatcaagaaagagctgacgagtttgggctttttggaaagtggttctgacccgggacaactgaagcatgtggttgatgtcacagacacagtgaggaaggatgtggaggagtggggacccttcgatcttgtgtacggcgccacacctcccctgggccacacctgtgaccgtcctcccagctggtacctgttccagttccaccggctcctgcagtacgcacggcccaagccaggcagccccaggcccttcttctggatgttcgtggacaatctggtgctgaacaaggaagacctggacgtcgcatctcgcttcctggagatggagccagtcaccatcccagatgtccacggcggatccttgcagaatgctgtccgcgtgtggagcaacatcccagccataaggagcagcaggcactgggctctggtttcggaagaagaattgtccctgctggcccagaacaagcagagctcgaagctcgcggccaagtggcccaccaagctggtgaagaactgctttctccccctaagagaatatttcaagtatttttcaatgcattaatgagatcccaagcacgcagcaatgcagctcaaaacgcttagcctagccacacccccacgggaaacagcagtgattaacctttagcaataaacgaaagtttaactaagctatactaaccccagggttggtcaatttcgtgccagccacaccctggtactgcatgcacgcaatgctagctgcccctttcccgtcctgggcaccccgagtctcccccgaccccgggtcccaggtatgctcccacctccacctgccccactcaccacctctgctagttccagacacctccgagacgaggaaaaaaaaaaaaaaaaaaaaaaaaaaaaaaaaaaaaaaaaaaaaaaaaaaaaaaaaaaaaaaaaaaaaaaaaaaaaaaaaaaaaaaaaaaaaaaaaaaaaaaaaaaaaaaaaaaaaaaaaaaaaaaaaaaaaaaaaaaaaaaaaaaaaaaaaaaaaaaaaaaaaaaaaaaaaaaaaaaaaaaaaaaaaaaaaaaaaaaaaaaaaaaaaaaaaaaaaaaaaaaaaaaaaaaaaaaaaaaaaaaaaaaaaaaaaaaaaaaaaaaaaaaaaaaaaaaaaaaaaaaaaaaaaaaaaaaaaaaaaaaaaaaaaaaaaaaaaaaaaaaaaaaaaaaaaaaaaaaaaaaaaaaaaaaaaaaaaaaaaaaaaaaaaaaaaaaaaaaaaaaaaaaaaaaaaaaccgtcttcaagctttctagaaattcactggccgtcgttttacaacgtcgtgactgggaaaaccctggcgttacccaacttaatcgccttgcagcacatccccctttcgccagctggcgtaatagcgaagaggcccgcaccgatcgcccttcccaacagttgcgcagcctgaatggcgaatggcgcctgatgcggtattttctccttacgcatctgtgcggtatttcacaccgcatatggtgcactctcagtacaatctgctctgatgccgcatagttaagccagccccgacacccgccaacacccgctgacgcgccctgacgggcttgtctgctcccggcatccgcttacagacaagctgtgaccgtctccgggagctgcatgtgtcagaggttttcaccgtcatcaccgaaacgcgcgagacgaaagggcctcgtgatacgcctatttttataggttaatgtcatgataataatggtttcttagacgtcaggtggcacttttcggggaaatgtgcgcggaacccctatttgtttatttttctaaatacattcaaatatgtatccgctcatgagacaataaccctgataaatgcttcaataatattgaaaaaggaagagtatgagtattcaacatttccgtgtcgcccttattcccttttttgcggcattttgccttcctgtttttgctcacccagaaacgctggtgaaagtaaaagatgctgaagatcagttgggtgcacgagtgggttacatcgaactggatctcaacagcggtaagatccttgagagttttcgccccgaagaacgttttccaatgatgagcacttttaaagttctgctatgtggcgcggtattatcccgtattgacgccgggcaagagcaactcggtcgccgcatacactattctcagaatgacttggttgagtactcaccagtcacagaaaagcatcttacggatggcatgacagtaagagaattatgcagtgctgccataaccatgagtgataacactgcggccaacttacttctgacaacgatcggaggaccgaaggagctaaccgcttttttgcacaacatgggggatcatgtaactcgccttgatcgttgggaaccggagctgaatgaagccataccaaacgacgagcgtgacaccacgatgcctgtagcaatggcaacaacgttgcgcaaactattaactggcgaactacttactctagcttcccggcaacaattaatagactggatggaggcggataaagttgcaggaccacttctgcgctcggcccttccggctggctggtttattgctgataaatctggagccggtgagcgtgggtctcgcggtatcattgcagcactggggccagatggtaagccctcccgtatcgtagttatctacacgacggggagtcaggcaactatggatgaacgaaatagacagatcgctgagataggtgcctcactgattaagcattggtaactgtcagaccaagtttactcatatatactttagattgatttaaaacttcatttttaatttaaaaggatctaggtgaagatcctttttgataatctcatgaccaaaatcccttaacgtgagttttcgttccactgagcgtcagaccccgtagaaaagatcaaaggatcttcttgagatcctttttttctgcgcgtaatctgctgcttgcaaacaaaaaaaccaccgctaccagcggtggtttgtttgccggatcaagagctaccaactctttttccgaaggtaactggcttcagcagagcgcagataccaaatactgttcttctagtgtagccgtagttaggccaccacttcaagaactctgtagcaccgcctacatacctcgctctgctaatcctgttaccagtggctgctgccagtggcgataagtcgtgtcttaccgggttggactcaagacgatagttaccggataaggcgcagcggtcgggctgaacggggggttcgtgcacacagcccagcttggagcgaacgacctacaccgaactgagatacctacagcgtgagctatgagaaagcgccacgcttcccgaagggagaaaggcggacaggtatccggtaagcggcagggtcggaacaggagagcgcacgagggagcttccagggggaaacgcctggtatctttatagtcctgtcgggtttcgccacctctgacttgagcgtcgatttttgtgatgctcgtcaggggggcggagcctatggaaaaacgccagcaacgcggcctttttacggttcctggccttttgctggccttttgctcacatgttctttcctgcgttatcccctgattctgtggataaccgtattaccgcctttgagtgagctgataccgctcgccgcagccgaacgaccgagcgcagcgagtcagtgagcgaggaagcggaagagcgcccaatacgcaaaccgcctctccccgcgcgttggccgattcattaatgcagctggcacgacaggtttcccgactggaaagcgggcagtgagcgcaacgcaattaatgtgagttagctcactcattaggcaccccaggctttacactttatgcttccggctcgtatgttgtgtggaattgtgagcggataacaatttcacacaggaaacagctatgaccatgattacgcctctagaaagctttaatacgactcactataaggactcactatttgttttcgcgcccagttgcaaaaagtgtcgacatttgcttctgacacaactgtgttcactagcaacctcaaacagacacctta

SEQ ID NO: 153 - DNA, 10838 bp, synthetic construct
  misc_feature 1..10838: note = V35 DNA
  source 1..10838: mol_type = other DNA
attaagccaccatgccaaaaaagaagagaaaggtaatggacaagaagtacagcatcggcctggccatcggcaccaactctgtgggctgggccgtgatcaccgacgagtacaaggtgcccagcaagaaattcaaggtgctgggcaacaccgaccggcacagcatcaagaagaacctgatcggcgccctgctgttcgacagcggagaaacagccgaggccacccggctgaagagaaccgccagaagaagatacaccagacggaagaaccggatctgctatctgcaagagatcttcagcaacgagatggccaaggtggacgacagcttcttccacagactggaagagtccttcctggtggaagaggataagaagcacgagcggcaccccatcttcggcaacatcgtggacgaggtggcctaccacgagaagtaccccaccatctaccacctgagaaagaaactggtggacagcaccgacaaggccgacctgcggctgatctatctggccctggcccacatgatcaagttccggggccacttcctgatcgagggcgacctgaaccccgacaacagcgacgtggacaagctgttcatccagctggtgcagacctacaaccagctgttcgaggaaaaccccatcaacgccagcggcgtggacgccaaggccatcctgtctgccagactgagcaagagcagacggctggaaaatctgatcgcccagctgcccggcgagaagaagaatggcctgttcggcaacctgattgccctgagcctgggcctgacccccaacttcaagagcaacttcgacctggccgaggatgccaaactgcagctgagcaaggacacctacgacgacgacctggacaacctgctggcccagatcggcgaccagtacgccgacctgtttctggccgccaagaacctgtccgacgccatcctgctgagcgacatcctgagagtgaacaccgagatcaccaaggcccccctgagcgcctctatgatcaagagatacgacgagcaccaccaggacctgaccctgctgaaagctctcgtgcggcagcagctgcctgagaagtacaaagagattttcttcgaccagagcaagaacggctacgccggctacatcgatggcggagccagccaggaagagttctacaagttcatcaagcccatcctggaaaagatggacggcaccgaggaactgctcgtgaagctgaacagagaggacctgctgcggaagcagcggaccttcgacaacggcagcatcccccaccagatccacctgggagagctgcacgccattctgcggcggcaggaagatttttacccattcctgaaggacaaccgggaaaagatcgagaagatcctgaccttccgcatcccctactacgtgggccctctggccaggggaaacagcagattcgcctggatgaccagaaagagcgaggaaaccatcaccccctggaacttcgaggaagtggtggacaagggcgccagcgcccagagcttcatcgagcggatgaccaacttcgataagaacctgcccaacgagaaggtgctgcccaagcacagcctgctgtacgagtacttcaccgtgtacaacgagctgaccaaagtgaaatacgtgaccgagggaatgagaaagcccgccttcctgagcggcgagcagaaaaaagccatcgtggacctgctgttcaagaccaaccggaaagtgaccgtgaagcagctgaaagaggactacttcaagaaaatcgagtgcttcgactccgtggaaatctccggcgtggaagatcggttcaacgcctccctgggcacataccacgatctgctgaaaattatcaaggacaaggacttcctggacaatgaggaaaacgaggacattctggaagatatcgtgctgaccctgacactgtttgaggacagagagatgatcgaggaacggctgaaaacctatgcccacctgttcgacgacaaagtgatgaagcagctgaagcggcggagatacaccggctggggcaggctgagccggaagctgatcaacggcatccgggacaagcagtccggcaagacaatcctggatttcctgaagtccgacggcttcgccaacagaaacttcatgcagctgatccacgacgacagcctgacctttaaagaggacatccagaaagcccaggtgtccggccagggcgatagcctgcacgagcacattgccaatctggccggcagccccgccattaagaagggcatcctgcagacagtgaaggtggtggacgagctcgtgaaagtgatgggccggcacaagcccgagaacatcgtgatcgaaatggccagagagaaccagaccacccagaagggacagaagaacagccgcgagagaatgaagcggatcgaagagggcatcaaagagctgggcagccagatcctgaaagaacaccccgtggaaaacacccagctgcagaacgagaagctgtacctgtactacctgcagaatgggcgggatatgtacgtggaccaggaactggacatcaaccggctgtccgactacgatgtggacgctatcgtgcctcagagctttctgaaggacgactccatcgataacaaagtgctgactcggagcgacaagaaccggggcaagagcgacaacgtgccctccgaagaggtcgtgaagaagatgaagaactactggcgccagctgctgaatgccaagctgattacccagaggaagttcgacaatctgaccaaggccgagagaggcggcctgagcgaactggataaggccggcttcatcaagagacagctggtggaaacccggcagatcacaaagcacgtggcacagatcctggactcccggatgaacactaagtacgacgagaacgacaaactgatccgggaagtgaaagtgatcaccctgaagtccaagctggtgtccgatttccggaaggatttccagttttacaaagtgcgcgagatcaacaactaccaccacgcccacgacgcctacctgaacgccgtcgtgggaaccgccctgatcaaaaagtaccctaagctggaaagcgagttcgtgtacggcgactacaaggtgtacgacgtgcggaagatgatcgccaagagcgagcaggaaatcggcaaggctaccgccaagtacttcttctacagcaacatcatgaactttttcaagaccgagattaccctggccaacggcgagatccggaagcggcctctgatcgagacaaacggcgaaacaggcgagatcgtgtgggataagggccgggactttgccaccgtgcggaaagtgctgtctatgccccaagtgaatatcgtgaaaaagaccgaggtgcagacaggcggcttcagcaaagagtctatcctgcccaagaggaacagcgacaagctgatcgccagaaagaaggactgggaccctaagaagtacggcggcttcgacagccccaccgtggcctattctgtgctggtggtggccaaagtggaaaagggcaagtccaagaaactgaagagtgtgaaagagctgctggggatcaccatcatggaaagaagcagcttcgagaagaatcccatcgactttctggaagccaagggctacaaagaagtgaaaaaggacctgatcatcaagctgcctaagtactccctgttcgagctggaaaacggccggaagagaatgctggcctctgccggcgaactgcagaagggaaacgaactggccctgccctccaaatatgtgaacttcctgtacctggccagccactatgagaagctgaagggctcccccgaggataatgagcagaaacagctgtttgtggaacagcacaaacactacctggacgagatcatcgagcagatcagcgagttctccaagagagtgatcctggccgacgctaatctggacaaggtgctgagcgcctacaacaagcacagagacaagcctatcagagagcaggccgagaatatcatccacctgtttaccctgaccaatctgggagcccctgccgccttcaagtactttgacaccaccatcgaccggaagaggtacaccagcaccaaagaggtgctggacgccaccctgatccaccagagcatcaccggcctgtacgagacacggatcgacctgtctcagctgggaggcgacgcctatccctatgacgtgcccgattatgccagcctgggcagcggctcccccaagaaaaaacgcaaggtggaagatcctaagaaaaagcggaaagtggacggcggagggccgagctctggcgcacccccaccaagtggagggtctcctgccgggtccccaacatctactgaagaaggcaccagcgaatccgcaacgcccgagtcaggccctggtacccatgtgagcgagctgattaaggagaacatgcacatgaagctgtacatggagggcaccgtggacaaccatcacttcaagtgcacatccgagggcgaaggcaagccctacgagggcacccagaccatgagaatcaaggtggtcgagggcggccctctccccttcgccttcgacatcctggctactagcttcctctacggcagcaagaccttcatcaaccacacccagggcatccccgacttcttcaagcagtccttccctgagggcttcacatgggagagagtcaccacatacgaagacgggggcgtgctgaccgctacccaggacaccagcctccaggacggctgcctcatctacaacgtcaagatcagaggggtgaacttcacatccaacggccctgtgatgcagaagaaaacactcggctgggaggccttcaccgaaacgctgtaccccgctgacggcggcctggaaggcagaaacgacatggccctgaagctcgtgggcgggagccatctgatcgcaaacatcaagaccacatatagatccaagaaacccgctaagaacctcaagatgcctggcgtctactatgtggactacagactggaaagaatcaaggaggccaacaacgagacctacgtcgagcagcacgaggtggcagtggccagatactgcgacctccctagcaaactggggcacaagcttaatggatctgcccctgggaccagcactgaaccatctgagatgaacaattcccagggaagagtgaccttcgaggacgtgaccgtgaacttcacccaaggcgagtggcagagactgaaccccgagcagagaaacctgtaccgggacgtgatgctggaaaactacagcaacctggtgtccgtcggccagggcgagacaacaaagcctgacgtgatcctgcggctggaacagggcaaagagccttggctggaagaggaagaggtgctcggatctggcagagccgagaagaatggcgatatcggcggacagatctggaagccaaaggatgtgaaagagagtctcagcggcagcgagacccccggtaccagcgagggcggccctagcagcggcgcccctccccctagcggcggcagccctgccggatcccctacaagcaccgaagaaggcacaagcgagtccgctacccctgagtccggccctggcacctccacagagcctagcgagggatccgctcctggatcccctgccggaagccctacctccaccgaggagggcacaagcaccgagccttccgagggcagcgcccccggaacaagcaccgaacctagcgagagcgccacccccgagagcatgttcgaaaccgtgcctgtgtggaggagacagccagtccgggtgctgtccctttttgaagacatcaagaaagagctgacgagtttgggctttttggaaagtggttctgacccgggacaactgaagcatgtggttgatgtcacagacacagtgaggaaggatgtggaggagtggggacccttcgatcttgtgtacggcgccacacctcccctgggccacacctgtgaccgtcctcccagctggtacctgttccagttccaccggctcctgcagtacgcacggcccaagccaggcagccccaggcccttcttctggatgttcgtggacaatctggtgctgaacaaggaagacctggacgtcgcatctcgcttcctggagatggagccagtcaccatcccagatgtccacggcggatccttgcagaatgctgtccgcgtgtggagcaacatcccagccataaggagcagcaggcactgggctctggtttcggaagaagaattgtccctgctggcccagaacaagcagagctcgaagctcgcggccaagtggcccaccaagctggtgaagaactgctttctccccctaagagaatatttcaagtatttttcaacagaactcacttcctctttatctagcggcaatagtaacgctaacagccgcgggccgagcttcagcagcggcctggtgccgttaagcttgcgcggcagccatatgaaccatgaccaggaatttgaccccccaaaggtttacccacctgtgccagctgagaagaggaagcccatccgcgtgctgtctctctttgatgggattgctacagggctcctggtgctgaaggacctgggcatccaagtggaccgctacattgcctccgaggtgtgtgaggactccatcacggtgggcatggtgcggcaccagggaaagatcatgtacgtcggggacgtccgcagcgtcacacagaagcatatccaggagtggggcccattcgacctggtgattggaggcagtccctgcaatgacctctccattgtcaaccctgcccgcaagggactttatgagggtactggccgcctcttctttgagttctaccgcctcctgcatgatgcgcggcccaaggagggagatgatcgccccttcttctggctctttgagaatgtggtggccatgggcgttagtgacaagagggacatctcgcgatttcttgagtctaaccccgtgatgattgacgccaaagaagtgtctgctgcacacagggcccgttacttctggggtaaccttcctggcatgaacaggcctttggcatccactgtgaatgataagctggagctgcaagagtgtctggagcacggcagaatagccaagttcagcaaagtgaggaccattaccaccaggtcaaactctataaagcagggcaaagaccagcatttccccgtcttcatgaacgagaaggaggacatcctgtggtgcactgaaatggaaagggtgtttggcttccccgtccactacacagacgtctccaacatgagccgcttggcgaggcagagactgctgggccgatcgtggagcgtgccggtcatccgccacctcttcgctccgctgaaggaatattttgcttgtgtgctcgaggctactaacttcagcctgctgaagcaggctggagacgtggaggagaaccctggacctatgcattaatgagatcccaagcacgcagcaatgcagctcaaaacgcttagcctagccacacccccacgggaaacagcagtgattaacctttagcaataaacgaaagtttaactaagctatactaaccccagggttggtcaatttcgtgccagccacaccctggtactgcatgcacgcaatgctagctgcccctttcccgtcctgggcaccccgagtctcccccgaccccgggtcccaggtatgctcccacctccacctgccccactcaccacctctgctagttccagacacctccgagacgaggaaaaaaaaaaaaaaaaaaaaaaaaaaaaaaaaaaaaaaaaaaaaaaaaaaaaaaaaaaaaaaaaaaaaaaaaaaaaaaaaaaaaaaaaaaaaaaaaaaaaaaaaaaaaaaaaaaaaaaaaaaaaaaaaaaaaaaaaaaaaaaaaaaaaaaaaaaaaaaaaaaaaaaaaaaaaaaaaaaaaaaaaaaaaaaaaaaaaaaaaaaaaaaaaaaaaaaaaaaaaaaaaaaaaaaaaaaaaaaaaaaaaaaaaaaaaaaaaaaaaaaaaaaaaaaaaaaaaaaaaaaaaaaaaaaaaaaaaaaaaaaaaaaaaaaaaaaaaaaaaaaaaaaaaaaaaaaaaaaaaaaaaaaaaaaaaaaaaaaaaaaaaaaaaaaaaaaaaaaaaaaaaaaaaaaaaaaccgtcttcaagctttctagaaattcactggccgtcgttttacaacgtcgtgactgggaaaaccctggcgttacccaacttaatcgccttgcagcacatccccctttcgccagctggcgtaatagcgaagaggcccgcaccgatcgcccttcccaacagttgcgcagcctgaatggcgaatggcgcctgatgcggtattttctccttacgcatctgtgcggtatttcacaccgcatatggtgcactctcagtacaatctgctctgatgccgcatagttaagccagccccgacacccgccaacacccgctgacgcgccctgacgggcttgtctgctcccggcatccgcttacagacaagctgtgaccgtctccgggagctgcatgtgtcagaggttttcaccgtcatcaccgaaacgcgcgagacgaaagggcctcgtgatacgcctatttttataggttaatgtcatgataataatggtttcttagacgtcaggtggcacttttcggggaaatgtgcgcggaacccctatttgtttatttttctaaatacattcaaatatgtatccgctcatgagacaataaccctgataaatgcttcaataatattgaaaaaggaagagtatgagtattcaacatttccgtgtcgcccttattcccttttttgcggcattttgccttcctgtttttgctcacccagaaacgctggtgaaagtaaaagatgctgaagatcagttgggtgcacgagtgggttacatcgaactggatctcaacagcggtaagatccttgagagttttcgccccgaagaacgttttccaatgatgagcacttttaaagttctgctatgtggcgcggtattatcccgtattgacgccgggcaagagcaactcggtcgccgcatacactattctcagaatgacttggttgagtactcaccagtcacagaaaagcatcttacggatggcatgacagtaagagaattatgcagtgctgccataaccatgagtgataacactgcggccaacttacttctgacaacgatcggaggaccgaaggagctaaccgcttttttgcacaacatgggggatcatgtaactcgccttgatcgttgggaaccggagctgaatgaagccataccaaacgacgagcgtgacaccacgatgcctgtagcaatggcaacaacgttgcgcaaactattaactggcgaactacttactctagcttcccggcaacaattaatagactggatggaggcggataaagttgcaggaccacttctgcgctcggcccttccggctggctggtttattgctgataaatctggagccggtgagcgtgggtctcgcggtatcattgcagcactggggccagatggtaagccctcccgtatcgtagttatctacacgacggggagtcaggcaactatggatgaacgaaatagacagatcgctgagataggtgcctcactgattaagcattggtaactgtcagaccaagtttactcatatatactttagattgatttaaaacttcatttttaatttaaaaggatctaggtgaagatcctttttgataatctcatgaccaaaatcccttaacgtgagttttcgttccactgagcgtcagaccccgtagaaaagatcaaaggatcttcttgagatcctttttttctgcgcgtaatctgctgcttgcaaacaaaaaaaccaccgctaccagcggtggtttgtttgccggatcaagagctaccaactctttttccgaaggtaactggcttcagcagagcgcagataccaaatactgttcttctagtgtagccgtagttaggccaccacttcaagaactctgtagcaccgcctacatacctcgctctgctaatcctgttaccagtggctgctgccagtggcgataagtcgtgtcttaccgggttggactcaagacgatagttaccggataaggcgcagcggtcgggctgaacggggggttcgtgcacacagcccagcttggagcgaacgacctacaccgaactgagatacctacagcgtgagctatgagaaagcgccacgcttcccgaagggagaaaggcggacaggtatccggtaagcggcagggtcggaacaggagagcgcacgagggagcttccagggggaaacgcctggtatctttatagtcctgtcgggtttcgccacctctgacttgagcgtcgatttttgtgatgctcgtcaggggggcggagcctatggaaaaacgccagcaacgcggcctttttacggttcctggccttttgctggccttttgctcacatgttctttcctgcgttatcccctgattctgtggataaccgtattaccgcctttgagtgagctgataccgctcgccgcagccgaacgaccgagcgcagcgagtcagtgagcgaggaagcggaagagcgcccaatacgcaaaccgcctctccccgcgcgttggccgattcattaatgcagctggcacgacaggtttcccgactggaaagcgggcagtgagcgcaacgcaattaatgtgagttagctcactcattaggcaccccaggctttacactttatgcttccggctcgtatgttgtgtggaattgtgagcggataacaatttcacacaggaaacagctatgaccatgattacgcctctagaaagctttaatacgactcactataaggactcactatttgttttcgcgcccagttgcaaaaagtgtcgacatttgcttctgacacaactgtgttcactagcaacctcaaacagacacctta

SEQ ID NO: 154 - DNA, 10730 bp, synthetic construct
  misc_feature 1..10730: note = V36 DNA
  source 1..10730: mol_type = other DNA
attaagccaccatgccaaaaaagaagagaaaggtaatggacaagaagtacagcatcggcctggccatcggcaccaactctgtgggctgggccgtgatcaccgacgagtacaaggtgcccagcaagaaattcaaggtgctgggcaacaccgaccggcacagcatcaagaagaacctgatcggcgccctgctgttcgacagcggagaaacagccgaggccacccggctgaagagaaccgccagaagaagatacaccagacggaagaaccggatctgctatctgcaagagatcttcagcaacgagatggccaaggtggacgacagcttcttccacagactggaagagtccttcctggtggaagaggataagaagcacgagcggcaccccatcttcggcaacatcgtggacgaggtggcctaccacgagaagtaccccaccatctaccacctgagaaagaaactggtggacagcaccgacaaggccgacctgcggctgatctatctggccctggcccacatgatcaagttccggggccacttcctgatcgagggcgacctgaaccccgacaacagcgacgtggacaagctgttcatccagctggtgcagacctacaaccagctgttcgaggaaaaccccatcaacgccagcggcgtggacgccaaggccatcctgtctgccagactgagcaagagcagacggctggaaaatctgatcgcccagctgcccggcgagaagaagaatggcctgttcggcaacctgattgccctgagcctgggcctgacccccaacttcaagagcaacttcgacctggccgaggatgccaaactgcagctgagcaaggacacctacgacgacgacctggacaacctgctggcccagatcggcgaccagtacgccgacctgtttctggccgccaagaacctgtccgacgccatcctgctgagcgacatcctgagagtgaacaccgagatcaccaaggcccccctgagcgcctctatgatcaagagatacgacgagcaccaccaggacctgaccctgctgaaagctctcgtgcggcagcagctgcctgagaagtacaaagagattttcttcgaccagagcaagaacggctacgccggctacatcgatggcggagccagccaggaagagttctacaagttcatcaagcccatcctggaaaagatggacggcaccgaggaactgctcgtgaagctgaacagagaggacctgctgcggaagcagcggaccttcgacaacggcagcatcccccaccagatccacctgggagagctgcacgccattctgcggcggcaggaagatttttacccattcctgaaggacaaccgggaaaagatcgagaagatcctgaccttccgcatcccctactacgtgggccctctggccaggggaaacagcagattcgcctggatgaccagaaagagcgaggaaaccatcaccccctggaacttcgaggaagtggtggacaagggcgccagcgcccagagcttcatcgagcggatgaccaacttcgataagaacctgcccaacgagaaggtgctgcccaagcacagcctgctgtacgagtacttcaccgtgtacaacgagctgaccaaagtgaaatacgtgaccgagggaatgagaaagcccgccttcctgagcggcgagcagaaaaaagccatcgtggacctgctgttcaagaccaaccggaaagtgaccgtgaagcagctgaaagaggactacttcaagaaaatcgagtgcttcgactccgtggaaatctccggcgtggaagatcggttcaacgcctccctgggcacataccacgatctgctgaaaattatcaaggacaaggacttcctggacaatgaggaaaacgaggacattctggaagatatcgtgctgaccctgacactgtttgaggacagagagatgatcgaggaacggctgaaaacctatgcccacctgttcgacgacaaagtgatgaagcagctgaagcggcggagatacaccggctggggcaggctgagccggaagctgatcaacggcatccgggacaagcagtccggcaagacaatcctggatttcctgaagtccgacggcttcgccaacagaaacttcatgcagctgatccacgacgacagcctgacctttaaagaggacatccagaaagcccaggtgtccggccagggcgatagcctgcacgagcacattgccaatctggccggcagccccgccattaagaagggcatcctgcagacagtgaaggtggtggacgagctcgtgaaagtgatgggccggcacaagcccgagaacatcgtgatcgaaatggccagagagaaccagaccacccagaagggacagaagaacagccgcgagagaatgaagcggatcgaagagggcatcaaagagctgggcagccagatcctgaaagaacaccccgtggaaaacacccagctgcagaacgagaagctgtacctgtactacctgcagaatgggcgggatatgtacgtggaccaggaactggacatcaaccggctgtccgactacgatgtggacgctatcgtgcctcagagctttctgaaggacgactccatcgataacaaagtgctgactcggagcgacaagaaccggggcaagagcgacaacgtgccctccgaagaggtcgtgaagaagatgaagaactactggcgccagctgctgaatgccaagctgattacccagaggaagttcgacaatctgaccaaggccgagagaggcggcctgagcgaactggataaggccggcttcatcaagagacagctggtggaaacccggcagatcacaaagcacgtggcacagatcctggactcccggatgaacactaagtacgacgagaacgacaaactgatccgggaagtgaaagtgatcaccctgaagtccaagctggtgtccgatttccggaaggatttccagttttacaaagtgcgcgagatcaacaactaccaccacgcccacgacgcctacctgaacgccgtcgtgggaaccgccctgatcaaaaagtaccctaagctggaaagcgagttcgtgtacggcgactacaaggtgtacgacgtgcggaagatgatcgccaagagcgagcaggaaatcggcaaggctaccgccaagtacttcttctacagcaacatcatgaactttttcaagaccgagattaccctggccaacggcgagatccggaagcggcctctgatcgagacaaacggcgaaacaggcgagatcgtgtgggataagggccgggactttgccaccgtgcggaaagtgctgtctatgccccaagtgaatatcgtgaaaaagaccgaggtgcagacaggcggcttcagcaaagagtctatcctgcccaagaggaacagcgacaagctgatcgccagaaagaaggactgggaccctaagaagtacggcggcttcgacagccccaccgtggcctattctgtgctggtggtggccaaagtggaaaagggcaagtccaagaaactgaagagtgtgaaagagctgctggggatcaccatcatggaaagaagcagcttcgagaagaatcccatcgactttctggaagccaagggctacaaagaagtgaaaaaggacctgatcatcaagctgcctaagtactccctgttcgagctggaaaacggccggaagagaatgctggcctctgccggcgaactgcagaagggaaacgaactggccctgccctccaaatatgtgaacttcctgtacctggccagccactatgagaagctgaagggctcccccgaggataatgagcagaaacagctgtttgtggaacagcacaaacactacctggacgagatcatcgagcagatcagcgagttctccaagagagtgatcctggccgacgctaatctggacaaggtgctgagcgcctacaacaagcacagagacaagcctatcagagagcaggccgagaatatcatccacctgtttaccctgaccaatctgggagcccctgccgccttcaagtactttgacaccaccatcgaccggaagaggtacaccagcaccaaagaggtgctggacgccaccctgatccaccagagcatcaccggcctgtacgagacacggatcgacctgtctcagctgggaggcgacgcctatccctatgacgtgcccgattatgccagcctgggcagcggctcccccaagaaaaaacgcaaggtggaagatcctaagaaaaagcggaaagtggacggcggagggccgagctctggcgcacccccaccaagtggagggtctcctgccgggtccccaacatctactgaagaaggcaccagcgaatccgcaacgcccgagtcaggccctggtacccatgtgagcgagctgattaaggagaacatgcacatgaagctgtacatggagggcaccgtggacaaccatcacttcaagtgcacatccgagggcgaaggcaagccctacgagggcacccagaccatgagaatcaaggtggtcgagggcggccctctccccttcgccttcgacatcctggctactagcttcctctacggcagcaagaccttcatcaaccacacccagggcatccccgacttcttcaagcagtccttccctgagggcttcacatgggagagagtcaccacatacgaagacgggggcgtgctgaccgctacccaggacaccagcctccaggacggctgcctcatctacaacgtcaagatcagaggggtgaacttcacatccaacggccctgtgatgcagaagaaaacactcggctgggaggccttcaccgaaacgctgtaccccgctgacggcggcctggaaggcagaaacgacatggccctgaagctcgtgggcgggagccatctgatcgcaaacatcaagaccacatatagatccaagaaacccgctaagaacctcaagatgcctggcgtctactatgtggactacagactggaaagaatcaaggaggccaacaacgagacctacgtcgagcagcacgaggtggcagtggccagatactgcgacctccctagcaaactggggcacaagcttaatggatctgcccctgggaccagcactgaaccatctgagcggacactcgagctgttccgcgacgtggccattgtgttctctcaagaggaatggcagtggctggcccctgctcagagagatctctaccgcgacgttatgctggagacatactccaatctcgtgtccctcggcctggccgtgtccaaacctgatgtgatcagcttcctcgagcagggaaaagaaccttggatgagcggcagcgagacccccggtaccagcgagggcggccctagcagcggcgcccctccccctagcggcggcagccctgccggatcccctacaagcaccgaagaaggcacaagcgagtccgctacccctgagtccggccctggcacctccacagagcctagcgagggatccgctcctggatcccctgccggaagccctacctccaccgaggagggcacaagcaccgagccttccgagggcagcgcccccggaacaagcaccgaacctagcgagagcgccacccccgagagcatgttcgaaaccgtgcctgtgtggaggagacagccagtccgggtgctgtccctttttgaagacatcaagaaagagctgacgagtttgggctttttggaaagtggttctgacccgggacaactgaagcatgtggttgatgtcacagacacagtgaggaaggatgtggaggagtggggacccttcgatcttgtgtacggcgccacacctcccctgggccacacctgtgaccgtcctcccagctggtacctgttccagttccaccggctcctgcagtacgcacggcccaagccaggcagccccaggcccttcttctggatgttcgtggacaatctggtgctgaacaaggaagacctggacgtcgcatctcgcttcctggagatggagccagtcaccatcccagatgtccacggcggatccttgcagaatgctgtccgcgtgtggagcaacatcccagccataaggagcagcaggcactgggctctggtttcggaagaagaattgtccctgctggcccagaacaagcagagctcgaagctcgcggccaagtggcccaccaagctggtgaagaactgctttctccccctaagagaatatttcaagtatttttcaacagaactcacttcctctttatctagcggcaatagtaacgctaacagccgcgggccgagcttcagcagcggcctggtgccgttaagcttgcgcggcagccatatgaaccatgaccaggaatttgaccccccaaaggtttacccacctgtgccagctgagaagaggaagcccatccgcgtgctgtctctctttgatgggattgctacagggctcctggtgctgaaggacctgggcatccaagtggaccgctacattgcctccgaggtgtgtgaggactccatcacggtgggcatggtgcggcaccagggaaagatcatgtacgtcggggacgtccgcagcgtcacacagaagcatatccaggagtggggcccattcgacctggtgattggaggcagtccctgcaatgacctctccattgtcaaccctgcccgcaagggactttatgagggtactggccgcctcttctttgagttctaccgcctcctgcatgatgcgcggcccaaggagggagatgatcgccccttcttctggctctttgagaatgtggtggccatgggcgttagtgacaagagggacatctcgcgatttcttgagtctaaccccgtgatgattgacgccaaagaagtgtctgctgcacacagggcccgttacttctggggtaaccttcctggcatgaacaggcctttggcatccactgtgaatgataagctggagctgcaagagtgtctggagcacggcagaatagccaagttcagcaaagtgaggaccattaccaccaggtcaaactctataaagcagggcaaagaccagcatttccccgtcttcatgaacgagaaggaggacatcctgtggtgcactgaaatggaaagggtgtttggcttccccgtccactacacagacgtctccaacatgagccgcttggcgaggcagagactgctgggccgatcgtggagcgtgccggtcatccgccacctcttcgctccgctgaaggaatattttgcttgtgtgctcgaggctactaacttcagcctgctgaagcaggctggagacgtggaggagaaccctggacctatgcattaatgagatcccaagcacgcagcaatgcagctcaaaacgcttagcctagccacacccccacgggaaacagcagtgattaacctttagcaataaacgaaagtttaactaagctatactaaccccagggttggtcaatttcgtgccagccacaccctggtactgcatgcacgcaatgctagctgcccctttcccgtcctgggcaccccgagtctcccccgaccccgggtcccaggtatgctcccacctccacctgccccactcaccacctctgctagttccagacacctccgagacgaggaaaaaaaaaaaaaaaaaaaaaaaaaaaaaaaaaaaaaaaaaaaaaaaaaaaaaaaaaaaaaaaaaaaaaaaaaaaaaaaaaaaaaaaaaaaaaaaaaaaaaaaaaaaaaaaaaaaaaaaaaaaaaaaaaaaaaaaaaaaaaaaaaaaaaaaaaaaaaaaaaaaaaaaaaaaaaaaaaaaaaaaaaaaaaaaaaaaaaaaaaaaaaaaaaaaaaaaaaaaaaaaaaaaaaaaaaaaaaaaaaaaaaaaaaaaaaaaaaaaaaaaaaaaaaaaaaaaaaaaaaaaaaaaaaaaaaaaaaaaaaaaaaaaaaaaaaaaaaaaaaaaaaaaaaaaaaaaaaaaaaaaaaaaaaaaaaaaaaaaaaaaaaaaaaaaaaaaaaaaaaaaaaaaaaaaaaaccgtcttcaagctttctagaaattcactggccgtcgttttacaacgtcgtgactgggaaaaccctggcgttacccaacttaatcgccttgcagcacatccccctttcgccagctggcgtaatagcgaagaggcccgcaccgatcgcccttcccaacagttgcgcagcctgaatggcgaatggcgcctgatgcggtattttctccttacgcatctgtgcggtatttcacaccgcatatggtgcactctcagtacaatctgctctgatgccgcatagttaagccagccccgacacccgccaacacccgctgacgcgccctgacgggcttgtctgctcccggcatccgcttacagacaagctgtgaccgtctccgggagctgcatgtgtcagaggttttcaccgtcatcaccgaaacgcgcgagacgaaagggcctcgtgatacgcctatttttataggttaatgtcatgataataatggtttcttagacgtcaggtggcacttttcggggaaatgtgcgcggaacccctatttgtttatttttctaaatacattcaaatatgtatccgctcatgagacaataaccctgataaatgcttcaataatattgaaaaaggaagagtatgagtattcaacatttccgtgtcgcccttattcccttttttgcggcattttgccttcctgtttttgctcacccagaaacgctggtgaaagtaaaagatgctgaagatcagttgggtgcacgagtgggttacatcgaactggatctcaacagcggtaagatccttgagagttttcgccccgaagaacgttttccaatgatgagcacttttaaagttctgctatgtggcgcggtattatcccgtattgacgccgggcaagagcaactcggtcgccgcatacactattctcagaatgacttggttgagtactcaccagtcacagaaaagcatcttacggatggcatgacagtaagagaattatgcagtgctgccataaccatgagtgataacactgcggccaacttacttctgacaacgatcggaggaccgaaggagctaaccgcttttttgcacaacatgggggatcatgtaactcgccttgatcgttgggaaccggagctgaatgaagccataccaaacgacgagcgtgacaccacgatgcctgtagcaatggcaacaacgttgcgcaaactattaactggcgaactacttactctagcttcccggcaacaattaatagactggatggaggcggataaagttgcaggaccacttctgcgctcggcccttccggctggctggtttattgctgataaatctggagccggtgagcgtgggtctcgcggtatcattgcagcactggggccagatggtaagccctcccgtatcgtagttatctacacgacggggagtcaggcaactatggatgaacgaaatagacagatcgctgagataggtgcctcactgattaagcattggtaactgtcagaccaagtttactcatatatactttagattgatttaaaacttcatttttaatttaaaaggatctaggtgaagatcctttttgataatctcatgaccaaaatcccttaacgtgagttttcgttccactgagcgtcagaccccgtagaaaagatcaaaggatcttcttgagatcctttttttctgcgcgtaatctgctgcttgcaaacaaaaaaaccaccgctaccagcggtggtttgtttgccggatcaagagctaccaactctttttccgaaggtaactggcttcagcagagcgcagataccaaatactgttcttctagtgtagccgtagttaggccaccacttcaagaactctgtagcaccgcctacatacctcgctctgctaatcctgttaccagtggctgctgccagtggcgataagtcgtgtcttaccgggttggactcaagacgatagttaccggataaggcgcagcggtcgggctgaacggggggttcgtgcacacagcccagcttggagcgaacgacctacaccgaactgagatacctacagcgtgagctatgagaaagcgccacgcttcccgaagggagaaaggcggacaggtatccggtaagcggcagggtcggaacaggagagcgcacgagggagcttccagggggaaacgcctggtatctttatagtcctgtcgggtttcgccacctctgacttgagcgtcgatttttgtgatgctcgtcaggggggcggagcctatggaaaaacgccagcaacgcggcctttttacggttcctggccttttgctggccttttgctcacatgttctttcctgcgttatcccctgattctgtggataaccgtattaccgcctttgagtgagctgataccgctcgccgcagccgaacgaccgagcgcagcgagtcagtgagcgaggaagcggaagagcgcccaatacgcaaaccgcctctccccgcgcgttggccgattcattaatgcagctggcacgacaggtttcccgactggaaagcgggcagtgagcgcaacgcaattaatgtgagttagctcactcattaggcaccccaggctttacactttatgcttccggctcgtatgttgtgtggaattgtgagcggataacaatttcacacaggaaacagctatgaccatgattacgcctctagaaagctttaatacgactcactataaggactcactatttgttttcgcgcccagttgcaaaaagtgtcgacatttgcttctgacacaactgtgttcactagcaacctcaaacagacacctta

SEQ ID NO: 155 - DNA, 10730 bp, synthetic construct
  misc_feature 1..10730: note = V37 DNA
  source 1..10730: mol_type = other DNA
attaagccaccatgccaaaaaagaagagaaaggtaatggacaagaagtacagcatcggcctggccatcggcaccaactctgtgggctgggccgtgatcaccgacgagtacaaggtgcccagcaagaaattcaaggtgctgggcaacaccgaccggcacagcatcaagaagaacctgatcggcgccctgctgttcgacagcggagaaacagccgaggccacccggctgaagagaaccgccagaagaagatacaccagacggaagaaccggatctgctatctgcaagagatcttcagcaacgagatggccaaggtggacgacagcttcttccacagactggaagagtccttcctggtggaagaggataagaagcacgagcggcaccccatcttcggcaacatcgtggacgaggtggcctaccacgagaagtaccccaccatctaccacctgagaaagaaactggtggacagcaccgacaaggccgacctgcggctgatctatctggccctggcccacatgatcaagttccggggccacttcctgatcgagggcgacctgaaccccgacaacagcgacgtggacaagctgttcatccagctggtgcagacctacaaccagctgttcgaggaaaaccccatcaacgccagcggcgtggacgccaaggccatcctgtctgccagactgagcaagagcagacggctggaaaatctgatcgcccagctgcccggcgagaagaagaatggcctgttcggcaacctgattgccctgagcctgggcctgacccccaacttcaagagcaacttcgacctggccgaggatgccaaactgcagctgagcaaggacacctacgacgacgacctggacaacctgctggcccagatcggcgaccagtacgccgacctgtttctggccgccaagaacctgtccgacgccatcctgctgagcgacatcctgagagtgaacaccgagatcaccaaggcccccctgagcgcctctatgatcaagagatacgacgagcaccaccaggacctgaccctgctgaaagctctcgtgcggcagcagctgcctgagaagtacaaagagattttcttcgaccagagcaagaacggctacgccggctacatcgatggcggagccagccaggaagagttctacaagttcatcaagcccatcctggaaaagatggacggcaccgaggaactgctcgtgaagctgaacagagaggacctgctgcggaagcagcggaccttcgacaacggcagcatcccccaccagatccacctgggagagctgcacgccattctgcggcggcaggaagatttttacccattcctgaaggacaaccgggaaaagatcgagaagatcctgaccttccgcatcccctactacgtgggccctctggccaggggaaacagcagattcgcctggatgaccagaaagagcgaggaaaccatcaccccctggaacttcgaggaagtggtggacaagggcgccagcgcccagagcttcatcgagcggatgaccaacttcgataagaacctgcccaacgagaaggtgctgcccaagcacagcctgctgtacgagtacttcaccgtgtacaacgagctgaccaaagtgaaatacgtgaccgagggaatgagaaagcccgccttcctgagcggcgagcagaaaaaagccatcgtggacctgctgttcaagaccaaccggaaagtgaccgtgaagcagctgaaagaggactacttcaagaaaatcgagtgcttcgactccgtggaaatctccggcgtggaagatcggttcaacgcctccctgggcacataccacgatctgctgaaaattatcaaggacaaggacttcctggacaatgaggaaaacgaggacattctggaagatatcgtgctgaccctgacactgtttgaggacagagagatgatcgaggaacggctgaaaacctatgcccacctgttcgacgacaaagtgatgaagcagctgaagcggcggagatacaccggctggggcaggctgagccggaagctgatcaacggcatccgggacaagcagtccggcaagacaatcctggatttcctgaagtccgacggcttcgccaacagaaacttcatgcagctgatccacgacgacagcctgacctttaaagaggacatccagaaagcccaggtgtccggccagggcgatagcctgcacgagcacattgccaatctggccggcagccccgccattaagaagggcatcctgcagacagtgaaggtggtggacgagctcgtgaaagtgatgggccggcacaagcccgagaacatcgtgatcgaaatggccagagagaaccagaccacccagaagggacagaagaacagccgcgagagaatgaagcggatcgaagagggcatcaaagagctgggcagccagatcctgaaagaacaccccgtggaaaacacccagctgcagaacgagaagctgtacctgtactacctgcagaatgggcgggatatgtacgtggaccaggaactggacatcaaccggctgtccgactacgatgtggacgctatcgtgcctcagagctttctgaaggacgactccatcgataacaaagtgctgactcggagcgacaagaaccggggcaagagcgacaacgtgccctccgaagaggtcgtgaagaagatgaagaactactggcgccagctgctgaatgccaagctgattacccagaggaagttcgacaatctgaccaaggccgagagaggcggcctgagcgaactggataaggccggcttcatcaagagacagctggtggaaacccggcagatcacaaagcacgtggcacagatcctggactcccggatgaacactaagtacgacgagaacgacaaactgatccgggaagtgaaagtgatcaccctgaagtccaagctggtgtccgatttccggaaggatttccagttttacaaagtgcgcgagatcaacaactaccaccacgcccacgacgcctacctgaacgccgtcgtgggaaccgccctgatcaaaaagtaccctaagctggaaagcgagttcgtgtacggcgactacaaggtgtacgacgtgcggaagatgatcgccaagagcgagcaggaaatcggcaaggctaccgccaagtacttcttctacagcaacatcatgaactttttcaagaccgagattaccctggccaacggcgagatccggaagcggcctctgatcgagacaaacggcgaaacaggcgagatcgtgtgggataagggccgggactttgccaccgtgcggaaagtgctgtctatgccccaagtgaatatcgtgaaaaagaccgaggtgcagacaggcggcttcagcaaagagtctatcctgcccaagaggaacagcgacaagctgatcgccagaaagaaggactgggaccctaagaagtacggcggcttcgacagccccaccgtggcctattctgtgctggtggtggccaaagtggaaaagggcaagtccaagaaactgaagagtgtgaaagagctgctggggatcaccatcatggaaagaagcagcttcgagaagaatcccatcgactttctggaagccaagggctacaaagaagtgaaaaaggacctgatcatcaagctgcctaagtactccctgttcgagctggaaaacggccggaagagaatgctggcctctgccggcgaactgcagaagggaaacgaactggccctgccctccaaatatgtgaacttcctgtacctggccagccactatgagaagctgaagggctcccccgaggataatgagcagaaacagctgtttgtggaacagcacaaacactacctggacgagatcatcgagcagatcagcgagttctccaagagagtgatcctggccgacgctaatctggacaaggtgctgagcgcctacaacaagcacagagacaagcctatcagagagcaggccgagaatatcatccacctgtttaccctgaccaatctgggagcccctgccgccttcaagtactttgacaccaccatcgaccggaagaggtacaccagcaccaaagaggtgctggacgccaccctgatccaccagagcatcaccggcctgtacgagacacggatcgacctgtctcagctgggaggcgacgcctatccctatgacgtgcccgattatgccagcctgggcagcggctcccccaagaaaaaacgcaaggtggaagatcctaagaaaaagcggaaagtggacggcggagggccgagctctggcgcacccccaccaagtggagggtctcctgccgggtccccaacatctactgaagaaggcaccagcgaatccgcaacgcccgagtcaggccctggtacccatgtgagcgagctgattaaggagaacatgcacatgaagctgtacatggagggcaccgtggacaaccatcacttcaagtgcacatccgagggcgaaggcaagccctacgagggcacccagaccatgagaatcaaggtggtcgagggcggccctctccccttcgccttcgacatcctggctactagcttcctctacggcagcaagaccttcatcaaccacacccagggcatccccgacttcttcaagcagtccttccctgagggcttcacatgggagagagtcaccacatacgaagacgggggcgtgctgaccgctacccaggacaccagcctccaggacggctgcctcatctacaacgtcaagatcagaggggtgaacttcacatccaacggccctgtgatgcagaagaaaacactcggctgggaggccttcaccgaaacgctgtaccccgctgacggcggcctggaaggcagaaacgacatggccctgaagctcgtgggcgggagccatctgatcgcaaacatcaagaccacatatagatccaagaaacccgctaagaacctcaagatgcctggcgtctactatgtggactacagactggaaagaatcaaggaggccaacaacgagacctacgtcgagcagcacgaggtggcagtggccagatactgcgacctccctagcaaactggggcacaagcttaatggatctgcccctgggaccagcactgaaccatctgagcggacactcatggcctttgaggacgtcgccgtgtatttttcccaagaagaatggggactgctcgacactgcccagagagccctgtatcgcagagtcatgctggacaacttcgccctggtggcctccctgggcctgtctacaagcagacccagagtggtcattcagctggaaagaggcgaggaaccctgggtcagcggcagcgagacccccggtaccagcgagggcggccctagcagcggcgcccctccccctagcggcggcagccctgccggatcccctacaagcaccgaagaaggcacaagcgagtccgctacccctgagtccggccctggcacctccacagagcctagcgagggatccgctcctggatcccctgccggaagccctacctccaccgaggagggcacaagcaccgagccttccgagggcagcgcccccggaacaagcaccgaacctagcgagagcgccacccccgagagcatgttcgaaaccgtgcctgtgtggaggagacagccagtccgggtgctgtccctttttgaagacatcaagaaagagctgacgagtttgggctttttggaaagtggttctgacccgggacaactgaagcatgtggttgatgtcacagacacagtgaggaaggatgtggaggagtggggacccttcgatcttgtgtacggcgccacacctcccctgggccacacctgtgaccgtcctcccagctggtacctgttccagttccaccggctcctgcagtacgcacggcccaagccaggcagccccaggcccttcttctggatgttcgtggacaatctggtgctgaacaaggaagacctggacgtcgcatctcgcttcctggagatggagccagtcaccatcccagatgtccacggcggatccttgcagaatgctgtccgcgtgtggagcaacatcccagccataaggagcagcaggcactgggctctggtttcggaagaagaattgtccctgctggcccagaacaagcagagctcgaagctcgcggccaagtggcccaccaagctggtgaagaactgctttctccccctaagagaatatttcaagtatttttcaacagaactcacttcctctttatctagcggcaatagtaacgctaacagccgcgggccgagcttcagcagcggcctggtgccgttaagcttgcgcggcagccatatgaaccatgaccaggaatttgaccccccaaaggtttacccacctgtgccagctgagaagaggaagcccatccgcgtgctgtctctctttgatgggattgctacagggctcctggtgctgaaggacctgggcatccaagtggaccgctacattgcctccgaggtgtgtgaggactccatcacggtgggcatggtgcggcaccagggaaagatcatgtacgtcggggacgtccgcagcgtcacacagaagcatatccaggagtggggcccattcgacctggtgattggaggcagtccctgcaatgacctctccattgtcaaccctgcccgcaagggactttatgagggtactggccgcctcttctttgagttctaccgcctcctgcatgatgcgcggcccaaggagggagatgatcgccccttcttctggctctttgagaatgtggtggccatgggcgttagtgacaagagggacatctcgcgatttcttgagtctaaccccgtgatgattgacgccaaagaagtgtctgctgcacacagggcccgttacttctggggtaaccttcctggcatgaacaggcctttggcatccactgtgaatgataagctggagctgcaagagtgtctggagcacggcagaatagccaagttcagcaaagtgaggaccattaccaccaggtcaaactctataaagcagggcaaagaccagcatttccccgtcttcatgaacgagaaggaggacatcctgtggtgcactgaaatggaaagggtgtttggcttccccgtccactacacagacgtctccaacatgagccgcttggcgaggcagagactgctgggccgatcgtggagcgtgccggtcatccgccacctcttcgctccgctgaaggaatattttgcttgtgtgctcgaggctactaacttcagcctgctgaagcaggctggagacgtggaggagaaccctggacctatgcattaatgagatcccaagcacgcagcaatgcagctcaaaacgcttagcctagccacacccccacgggaaacagcagtgattaacctttagcaataaacgaaagtttaactaagctatactaaccccagggttggtcaatttcgtgccagccacaccctggtactgcatgcacgcaatgctagctgcccctttcccgtcctgggcaccccgagtctcccccgaccccgggtcccaggtatgctcccacctccacctgccccactcaccacctctgctagttccagacacctccgagacgaggaaaaaaaaaaaaaaaaaaaaaaaaaaaaaaaaaaaaaaaaaaaaaaaaaaaaaaaaaaaaaaaaaaaaaaaaaaaaaaaaaaaaaaaaaaaaaaaaaaaaaaaaaaaaaaaaaaaaaaaaaaaaaaaaaaaaaaaaaaaaaaaaaaaaaaaaaaaaaaaaaaaaaaaaaaaaaaaaaaaaaaaaaaaaaaaaaaaaaaaaaaaaaaaaaaaaaaaaaaaaaaaaaaaaaaaaaaaaaaaaaaaaaaaaaaaaaaaaaaaaaaaaaaaaaaaaaaaaaaaaaaaaaaaaaaaaaaaaaaaaaaaaaaaaaaaaaaaaaaaaaaaaaaaaaaaaaaaaaaaaaaaaaaaaaaaaaaaaaaaaaaaaaaaaaaaaaaaaaaaaaaaaaaaaaaaaaaccgtcttcaagctttctagaaattcactggccgtcgttttacaacgtcgtgactgggaaaaccctggcgttacccaacttaatcgccttgcagcacatccccctttcgccagctggcgtaatagcgaagaggcccgcaccgatcgcccttcccaacagttgcgcagcctgaatggcgaatggcgcctgatgcggtattttctccttacgcatctgtgcggtatttcacaccgcatatggtgcactctcagtacaatctgctctgatgccgcatagttaagccagccccgacacccgccaacacccgctgacgcgccctgacgggcttgtctgctcccggcatccgcttacagacaagctgtgaccgtctccgggagctgcatgtgtcagaggttttcaccgtcatcaccgaaacgcgcgagacgaaagggcctcgtgatacgcctatttttataggttaatgtcatgataataatggtttcttagacgtcaggtggcacttttcggggaaatgtgcgcggaacccctatttgtttatttttctaaatacattcaaatatgtatccgctcatgagacaataaccctgataaatgcttcaataatattgaaaaaggaagagtatgagtattcaacatttccgtgtcgcccttattcccttttttgcggcattttgccttcctgtttttgctcacccagaaacgctggtgaaagtaaaagatgctgaagatcagttgggtgcacgagtgggttacatcgaactggatctcaacagcggtaagatccttgagagttttcgccccgaagaacgttttccaatgatgagcacttttaaagttctgctatgtggcgcggtattatcccgtattgacgccgggcaagagcaactcggtcgccgcatacactattctcagaatgacttggttgagtactcaccagtcacagaaaagcatcttacggatggcatgacagtaagagaattatgcagtgctgccataaccatgagtgataacactgcggccaacttacttctgacaacgatcggaggaccgaaggagctaaccgcttttttgcacaacatgggggatcatgtaactcgccttgatcgttgggaaccggagctgaatgaagccataccaaacgacgagcgtgacaccacgatgcctgtagcaatggcaacaacgttgcgcaaactattaactggcgaactacttactctagcttcccggcaacaattaatagactggatggaggcggataaagttgcaggaccacttctgcgctcggcccttccggctggctggtttattgctgataaatctggagccggtgagcgtgggtctcgcggtatcattgcagcactggggccagatggtaagccctcccgtatcgtagttatctacacgacggggagtcaggcaactatggatgaacgaaatagacagatcgctgagataggtgcctcactgattaagcattggtaactgtcagaccaagtttactcatatatactttagattgatttaaaacttcatttttaatttaaaaggatctaggtgaagatcctttttgataatctcatgaccaaaatcccttaacgtgagttttcgttccactgagcgtcagaccccgtagaaaagatcaaaggatcttcttgagatcctttttttctgcgcgtaatctgctgcttgcaaacaaaaaaaccaccgctaccagcggtggtttgtttgccggatcaagagctaccaactctttttccgaaggtaactggcttcagcagagcgcagataccaaatactgttcttctagtgtagccgtagttaggccaccacttcaagaactctgtagcaccgcctacatacctcgctctgctaatcctgttaccagtggctgctgccagtggcgataagtcgtgtcttaccgggttggactcaagacgatagttaccggataaggcgcagcggtcgggctgaacggggggttcgtgcacacagcccagcttggagcgaacgacctacaccgaactgagatacctacagcgtgagctatgagaaagcgccacgcttcccgaagggagaaaggcggacaggtatccggtaagcggcagggtcggaacaggagagcgcacgagggagcttccagggggaaacgcctggtatctttatagtcctgtcgggtttcgccacctctgacttgagcgtcgatttttgtgatgctcgtcaggggggcggagcctatggaaaaacgccagcaacgcggcctttttacggttcctggccttttgctggccttttgctcacatgttctttcctgcgttatcccctgattctgtggataaccgtattaccgcctttgagtgagctgataccgctcgccgcagccgaacgaccgagcgcagcgagtcagtgagcgaggaagcggaagagcgcccaatacgcaaaccgcctctccccgcgcgttggccgattcattaatgcagctggcacgacaggtttcccgactggaaagcgggcagtgagcgcaacgcaattaatgtgagttagctcactcattaggcaccccaggctttacactttatgcttccggctcgtatgttgtgtggaattgtgagcggataacaatttcacacaggaaacagctatgaccatgattacgcctctagaaagctttaatacgactcactataaggactcactatttgttttcgcgcccagttgcaaaaagtgtcgacatttgcttctgacacaactgtgttcactagcaacctcaaacagacacctta

SEQ ID NO: 156 - DNA, 10712 bp, synthetic construct
  misc_feature 1..10712: note = V38 DNA
  source 1..10712: mol_type = other DNA
ttttttgcacaacatgggggatcatgtaactcgccttgatcgttgggaaccggagctgaatgaagccataccaaacgacgagcgtgacaccacgatgcctgtagcaatggcaacaacgttgcgcaaactattaactggcgaactacttactctagcttcccggcaacaattaatagactggatggaggcggataaagttgcaggaccacttctgcgctcggcccttccggctggctggtttattgctgataaatctggagccggtgagcgtgggtctcgcggtatcattgcagcactggggccagatggtaagccctcccgtatcgtagttatctacacgacggggagtcaggcaactatggatgaacgaaatagacagatcgctgagataggtgcctcactgattaagcattggtaactgtcagaccaagtttactcatatatactttagattgatttaaaacttcatttttaatttaaaaggatctaggtgaagatcctttttgataatctcatgaccaaaatcccttaacgtgagttttcgttccactgagcgtcagaccccgtagaaaagatcaaaggatcttcttgagatcctttttttctgcgcgtaatctgctgcttgcaaacaaaaaaaccaccgctaccagcggtggtttgtttgccggatcaagagctaccaactctttttccgaaggtaactggcttcagcagagcgcagataccaaatactgttcttctagtgtagccgtagttaggccaccacttcaagaactctgtagcaccgcctacatacctcgctctgctaatcctgttaccagtggctgctgccagtggcgataagtcgtgtcttaccgggttggactcaagacgatagttaccggataaggcgcagcggtcgggctgaacggggggttcgtgcacacagcccagcttggagcgaacgacctacaccgaactgagatacctacagcgtgagctatgagaaagcgccacgcttcccgaagggagaaaggcggacaggtatccggtaagcggcagggtcggaacaggagagcgcacgagggagcttccagggggaaacgcctggtatctttatagtcctgtcgggtttcgccacctctgacttgagcgtcgatttttgtgatgctcgtcaggggggcggagcctatggaaaaacgccagcaacgcggcctttttacggttcctggccttttgctggccttttgctcacatgttctttcctgcgttatcccctgattctgtggataaccgtattaccgcctttgagtgagctgataccgctcgccgcagccgaacgaccgagcgcagcgagtcagtgagcgaggaagcggaagagcgcccaatacgcaaaccgcctctccccgcgcgttggccgattcattaatgcagctggcacgacaggtttcccgactggaaagcgggcagtgagcgcaacgcaattaatgtgagttagctcactcattaggcaccccaggctttacactttatgcttccggctcgtatgttgtgtggaattgtgagcggataacaatttcacacaggaaacagctatgaccatgattacgcctctagaaagctttaatacgactcactataaggactcactatttgttttcgcgcccagttgcaaaaagtgtcgacatttgcttctgacacaactgtgttcactagcaacctcaaacagacaccttaattaagccaccatgaacaattcccagggaagagtgaccttcgaggatgtcactgtgaacttcacccagggggagtggcagcggctgaatcccgaacagagaaacttgtacagggatgtgatgctggagaattacagcaaccttgtctctgtgggacaaggggaaaccaccaaacccgatgtgatcttgaggttggaacaaggaaaggagccatggttggaggaagaggaagtgctgggaagtggccgtgcagaaaaaaatggggacattggagggcagatttggaagccaaaggatgtgaaagagagtctcagcggcagcgagacccccggtaccagcgagagcgccacccccgagagccatgtgagcgagctgattaaggagaacatgcacatgaagctgtacatggagggcaccgtggacaaccatcacttcaagtgcacatccgagggcgaaggcaagccctacgagggcacccagaccatgagaatcaaggtggtcgagggcggccctctccccttcgccttcgacatcctggctactagcttcctctacggcagcaagaccttcatcaaccacacccagggcatccccgacttcttcaagcagtccttccctgagggcttcacatgggagagagtcaccacatacgaagacgggggcgtgctgaccgctacccaggacaccagcctccaggacggctgcctcatctacaacgtcaagatcagaggggtgaacttcacatccaacggccctgtgatgcagaagaaaacactcggctgggaggccttcaccgaaacgctgtaccccgctgacggcggcctggaaggcagaaacgacatggccctgaagctcgtgggcgggagccatctgatcgcaaacatcaagaccacatatagatccaagaaacccgctaagaacctcaagatgcctggcgtctactatgtggactacagactggaaagaatcaaggaggccaacaacgagacctacgtcgagcagcacgaggtggcagtggccagatactgcgacctccctagcaaactggggcacaagcttaatagcggcagcgagacccccggtaccagcgagagcgccacccccgagagcatgaaccatgaccaggaatttgaccccccaaaggtttacccacctgtgccagctgagaagaggaagcccatccgcgtgctgtctctctttgatgggattgctacagggctcctggtgctgaaggacctgggcatccaagtggaccgctacattgcctccgaggtgtgtgaggactccatcacggtgggcatggtgcggcaccagggaaagatcatgtacgtcggggacgtccgcagcgtcacacagaagcatatccaggagtggggcccattcgacctggtgattggaggcagtccctgcaatgacctctccattgtcaaccctgcccgcaagggactttatgagggtactggccgcctcttctttgagttctaccgcctcctgcatgatgcgcggcccaaggagggagatgatcgccccttcttctggctctttgagaatgtggtggccatgggcgttagtgacaagagggacatctcgcgatttcttgagtctaaccccgtgatgattgacgccaaagaagtgtctgctgcacacagggcccgttacttctggggtaaccttcctggcatgaacaggcctttggcatccactgtgaatgataagctggagctgcaagagtgtctggagcacggcagaatagccaagttcagcaaagtgaggaccattaccaccaggtcaaactctataaagcagggcaaagaccagcatttccccgtcttcatgaacgagaaggaggacatcctgtggtgcactgaaatggaaagggtgtttggcttccccgtccactacacagacgtctccaacatgagccgcttggcgaggcagagactgctgggccgatcgtggagcgtgccggtcatccgccacctcttcgctccgctgaaggaatattttgcttgtgtgtctagcggcaatagtaacgctaacagccgcgggccgagcttcagcagcggcctggtgccgttaagcttgcgcggcagccatatgttcgaaaccgtgcctgtgtggaggagacagccagtccgggtgctgtccctttttgaagacatcaagaaagagctgacgagtttgggctttttggaaagtggttctgacccgggacaactgaagcatgtggttgatgtcacagacacagtgaggaaggatgtggaggagtggggacccttcgatcttgtgtacggcgccacacctcccctgggccacacctgtgaccgtcctcccagctggtacctgttccagttccaccggctcctgcagtacgcacggcccaagccaggcagccccaggcccttcttctggatgttcgtggacaatctggtgctgaacaaggaagacctggacgtcgcatctcgcttcctggagatggagccagtcaccatcccagatgtccacggcggatccttgcagaatgctgtccgcgtgtggagcaacatcccagccataaggagcagcaggcactgggctctggtttcggaagaagaattgtccctgctggcccagaacaagcagagctcgaagctcgcggccaagtggcccaccaagctggtgaagaactgctttctccccctaagagaatatttcaagtatttttcaggagggccgagctctggcgcacccccaccaagtggagggtctcctgccgggtccccaacatctactgaagaaggcaccagcgaatccgcaacgcccgagtcaggccctggtacctccacagaaccatctgaaggtagtgcgcctggttccccagctggaagccctacttccaccgaagaaggcacgtcaaccgaaccaagtgaaggatctgcccctgggaccagcactgaaccatctgagccaaaaaagaagagaaaggtaatggacaagaagtacagcatcggcctggccatcggcaccaactctgtgggctgggccgtgatcaccgacgagtacaaggtgcccagcaagaaattcaaggtgctgggcaacaccgaccggcacagcatcaagaagaacctgatcggcgccctgctgttcgacagcggagaaacagccgaggccacccggctgaagagaaccgccagaagaagatacaccagacggaagaaccggatctgctatctgcaagagatcttcagcaacgagatggccaaggtggacgacagcttcttccacagactggaagagtccttcctggtggaagaggataagaagcacgagcggcaccccatcttcggcaacatcgtggacgaggtggcctaccacgagaagtaccccaccatctaccacctgagaaagaaactggtggacagcaccgacaaggccgacctgcggctgatctatctggccctggcccacatgatcaagttccggggccacttcctgatcgagggcgacctgaaccccgacaacagcgacgtggacaagctgttcatccagctggtgcagacctacaaccagctgttcgaggaaaaccccatcaacgccagcggcgtggacgccaaggccatcctgtctgccagactgagcaagagcagacggctggaaaatctgatcgcccagctgcccggcgagaagaagaatggcctgttcggcaacctgattgccctgagcctgggcctgacccccaacttcaagagcaacttcgacctggccgaggatgccaaactgcagctgagcaaggacacctacgacgacgacctggacaacctgctggcccagatcggcgaccagtacgccgacctgtttctggccgccaagaacctgtccgacgccatcctgctgagcgacatcctgagagtgaacaccgagatcaccaaggcccccctgagcgcctctatgatcaagagatacgacgagcaccaccaggacctgaccctgctgaaagctctcgtgcggcagcagctgcctgagaagtacaaagagattttcttcgaccagagcaagaacggctacgccggctacatcgatggcggagccagccaggaagagttctacaagttcatcaagcccatcctggaaaagatggacggcaccgaggaactgctcgtgaagctgaacagagaggacctgctgcggaagcagcggaccttcgacaacggcagcatcccccaccagatccacctgggagagctgcacgccattctgcggcggcaggaagatttttacccattcctgaaggacaaccgggaaaagatcgagaagatcctgaccttccgcatcccctactacgtgggccctctggccaggggaaacagcagattcgcctggatgaccagaaagagcgaggaaaccatcaccccctggaacttcgaggaagtggtggacaagggcgccagcgcccagagcttcatcgagcggatgaccaacttcgataagaacctgcccaacgagaaggtgctgcccaagcacagcctgctgtacgagtacttcaccgtgtacaacgagctgaccaaagtgaaatacgtgaccgagggaatgagaaagcccgccttcctgagcggcgagcagaaaaaagccatcgtggacctgctgttcaagaccaaccggaaagtgaccgtgaagcagctgaaagaggactacttcaagaaaatcgagtgcttcgactccgtggaaatctccggcgtggaagatcggttcaacgcctccctgggcacataccacgatctgctgaaaattatcaaggacaaggacttcctggacaatgaggaaaacgaggacattctggaagatatcgtgctgaccctgacactgtttgaggacagagagatgatcgaggaacggctgaaaacctatgcccacctgttcgacgacaaagtgatgaagcagctgaagcggcggagatacaccggctggggcaggctgagccggaagctgatcaacggcatccgggacaagcagtccggcaagacaatcctggatttcctgaagtccgacggcttcgccaacagaaacttcatgcagctgatccacgacgacagcctgacctttaaagaggacatccagaaagcccaggtgtccggccagggcgatagcctgcacgagcacattgccaatctggccggcagccccgccattaagaagggcatcctgcagacagtgaaggtggtggacgagctcgtgaaagtgatgggccggcacaagcccgagaacatcgtgatcgaaatggccagagagaaccagaccacccagaagggacagaagaacagccgcgagagaatgaagcggatcgaagagggcatcaaagagctgggcagccagatcctgaaagaacaccccgtggaaaacacccagctgcagaacgagaagctgtacctgtactacctgcagaatgggcgggatatgtacgtggaccaggaactggacatcaaccggctgtccgactacgatgtggacgctatcgtgcctcagagctttctgaaggacgactccatcgataacaaagtgctgactcggagcgacaagaaccggggcaagagcgacaacgtgccctccgaagaggtcgtgaagaagatgaagaactactggcgccagctgctgaatgccaagctgattacccagaggaagttcgacaatctgaccaaggccgagagaggcggcctgagcgaactggataaggccggcttcatcaagagacagctggtggaaacccggcagatcacaaagcacgtggcacagatcctggactcccggatgaacactaagtacgacgagaacgacaaactgatccgggaagtgaaagtgatcaccctgaagtccaagctggtgtccgatttccggaaggatttccagttttacaaagtgcgcgagatcaacaactaccaccacgcccacgacgcctacctgaacgccgtcgtgggaaccgccctgatcaaaaagtaccctaagctggaaagcgagttcgtgtacggcgactacaaggtgtacgacgtgcggaagatgatcgccaagagcgagcaggaaatcggcaaggctaccgccaagtacttcttctacagcaacatcatgaactttttcaagaccgagattaccctggccaacggcgagatccggaagcggcctctgatcgagacaaacggcgaaacaggcgagatcgtgtgggataagggccgggactttgccaccgtgcggaaagtgctgtctatgccccaagtgaatatcgtgaaaaagaccgaggtgcagacaggcggcttcagcaaagagtctatcctgcccaagaggaacagcgacaagctgatcgccagaaagaaggactgggaccctaagaagtacggcggcttcgacagccccaccgtggcctattctgtgctggtggtggccaaagtggaaaagggcaagtccaagaaactgaagagtgtgaaagagctgctggggatcaccatcatggaaagaagcagcttcgagaagaatcccatcgactttctggaagccaagggctacaaagaagtgaaaaaggacctgatcatcaagctgcctaagtactccctgttcgagctggaaaacggccggaagagaatgctggcctctgccggcgaactgcagaagggaaacgaactggccctgccctccaaatatgtgaacttcctgtacctggccagccactatgagaagctgaagggctcccccgaggataatgagcagaaacagctgtttgtggaacagcacaaacactacctggacgagatcatcgagcagatcagcgagttctccaagagagtgatcctggccgacgctaatctggacaaggtgctgagcgcctacaacaagcacagagacaagcctatcagagagcaggccgagaatatcatccacctgtttaccctgaccaatctgggagcccctgccgccttcaagtactttgacaccaccatcgaccggaagaggtacaccagcaccaaagaggtgctggacgccaccctgatccaccagagcatcaccggcctgtacgagacacggatcgacctgtctcagctgggaggcgacgcctatccctatgacgtgcccgattatgccagcctgggcagcggctcccccaagaaaaaacgcaaggtggaagatcctaagaaaaagcggaaagtggacggcctcgaggctactaacttcagcctgctgaagcaggctggagacgtggaggagaaccctggacctatgcattaatgagatcccaagcacgcagcaatgcagctcaaaacgcttagcctagccacacccccacgggaaacagcagtgattaacctttagcaataaacgaaagtttaactaagctatactaaccccagggttggtcaatttcgtgccagccacaccctggtactgcatgcacgcaatgctagctgcccctttcccgtcctgggcaccccgagtctcccccgaccccgggtcccaggtatgctcccacctccacctgccccactcaccacctctgctagttccagacacctccgagacgaggaaaaaaaaaaaaaaaaaaaaaaaaaaaaaaaaaaaaaaaaaaaaaaaaaaaaaaaaaaaaaaaaaaaaaaaaaaaaaaaaaaaaaaaaaaaaaaaaaaaaaaaaaaaaaaaaaaaaaaaaaaaaaaaaaaaaaaaaaaaaaaaaaaaaaaaaaaaaaaaaaaaaaaaaaaaaaaaaaaaaaaaaaaaaaaaaaaaaaaaaaaaaaaaaaaaaaaaaaaaaaaaaaaaaaaaaaaaaaaaaaaaaaaaaaaaaaaaaaaaaaaaaaaaaaaaaaaaaaaaaaaaaaaaaaaaaaaaaaaaaaaaaaaaaaaaaaaaaaaaaaaaaaaaaaaaaaaaaaaaaaaaaaaaaaaaaaaaaaaaaaaaaaaaaaaaaaaaaaaaaaaaaaaaaaaaaaaccgtcttcaagctttctagaaattcactggccgtcgttttacaacgtcgtgactgggaaaaccctggcgttacccaacttaatcgccttgcagcacatccccctttcgccagctggcgtaatagcgaagaggcccgcaccgatcgcccttcccaacagttgcgcagcctgaatggcgaatggcgcctgatgcggtattttctccttacgcatctgtgcggtatttcacaccgcatatggtgcactctcagtacaatctgctctgatgccgcatagttaagccagccccgacacccgccaacacccgctgacgcgccctgacgggcttgtctgctcccggcatccgcttacagacaagctgtgaccgtctccgggagctgcatgtgtcagaggttttcaccgtcatcaccgaaacgcgcgagacgaaagggcctcgtgatacgcctatttttataggttaatgtcatgataataatggtttcttagacgtcaggtggcacttttcggggaaatgtgcgcggaacccctatttgtttatttttctaaatacattcaaatatgtatccgctcatgagacaataaccctgataaatgcttcaataatattgaaaaaggaagagtatgagtattcaacatttccgtgtcgcccttattcccttttttgcggcattttgccttcctgtttttgctcacccagaaacgctggtgaaagtaaaagatgctgaagatcagttgggtgcacgagtgggttacatcgaactggatctcaacagcggtaagatccttgagagttttcgccccgaagaacgttttccaatgatgagcacttttaaagttctgctatgtggcgcggtattatcccgtattgacgccgggcaagagcaactcggtcgccgcatacactattctcagaatgacttggttgagtactcaccagtcacagaaaagcatcttacggatggcatgacagtaagagaattatgcagtgctgccataaccatgagtgataacactgcggccaacttacttctgacaacgatcggaggaccgaaggagctaaccgc

SEQ ID NO: 157 - DNA, 8906 bp, synthetic construct
  misc_feature 1..8906: note = V39 DNA
  source 1..8906: mol_type = other DNA
tgataatagggatcccaagcacgcagcaatgcagctcaaaacgcttagcctagccacacccccacgggaaacagcagtgattaacctttagcaataaacgaaagtttaactaagctatactaaccccagggttggtcaatttcgtgccagccacaccctggtactgcatgcacgcaatgctagctgcccctttcccgtcctgggcaccccgagtctcccccgaccccgggtcccaggtatgctcccacctccacctgccccactcaccacctctgctagttccagacacctccgaagatggaaaaaaaaaaaaaaaaaaaaaaaaaaaaaaaaaaaaaaaaaaaaaaaaaaaaaaaaaaaaaaaaaaaaaaaaaaaaaaaaaaaaaaaaaaaaaaaaaaaaaaaaaaaaaaaaaaaaaaaaaaaagcttggatcattgtcactttcaccgtcatcaccgaaacgcgcgatgcagctctggcccgtgtctcaaaatctctgatgttacattgcacaagataaaaatatatcatcatgaacaataaaactgtctgcttacataaacagtaatacaaggggtgttatgagccatattcaacgggaaacgtcgaggccgcgattaaattccaacatggatgctgatttatatgggtataaatgggctcgcgataatgtcgggcaatcaggtgcgacaatctatcgcttgtatgggaagcccgatgcgccagagttgtttctgaaacatggcaaaggtagcgttgccaatgatgttacagatgagatggtcagactaaactggctgacggaatttatgcctcttccgaccatcaagcattttatccgtactcctgatgatgcatggttactcaccactgcgatccccggaaaaacagcattccaggtattagaagaatatcctgattcaggtgaaaatattgttgatgcgctggcagtgttcctgcgccggttgcattcgattcctgtttgtaattgtccttttaacagcgatcgcgtatttcgtctcgctcaggcgcaatcacgaatgaataacggtttggttgatgcgagtgattttgatgacgagcgtaatggctggcctgttgaacaagtctggaaagaaatgcataaacttttgccattctcaccggattcagtcgtcactcatggtgatttctcacttgataaccttatttttgacgaggggaaattaataggttgtattgatgttggacgagtcggaatcgcagaccgataccaggatcttgccatcctatggaactgcctcggtgagttttctccttcattacagaaacggctttttcaaaaatatggtattgataatcctgatatgaataaattgcagtttcatttgatgctcgatgagtttttctaatcagaattggttaattggttgtaacattattcagattgggcttgatttaaaacttcatttttaatttaaaaggatctaggtgaagatcctttttgataatctcatgaccaaaatcccttaacgtgagttttcgttccactgagcgtcagaccccgtagaaaagatcaaaggatcttcttgagatcctttttttctgcgcgtaatctgctgcttgcaaacaaaaaaaccaccgctaccagcggtggtttgtttgccggatcaagagctaccaactctttttccgaaggtaactggcttcagcagagcgcagataccaaatactgttcttctagtgtagccgtagttaggccaccacttcaagaactctgtagcaccgcctacatacctcgctctgctaatcctgttaccagtggctgctgccagtggcgataagtcgtgtcttaccgggttggactcaagacgatagttaccggataaggcgcagcggtcgggctgaacggggggttcgtgcacacagcccagcttggagcgaacgacctacaccgaactgagatacctacagcgtgagctatgagaaagcgccacgcttcccgaagggagaaaggcggacaggtatccggtaagcggcagggtcggaacaggagagcgcacgagggagcttccagggggaaacgcctggtatctttatagtcctgtcgggtttcgccacctctgacttgagcgtcgatttttgtgatgctcgtcaggggggcggagcctatggaaaaacgccagcaacgcggcctttttacggttcctggccttttgctggccttttgctcacattctagataatacgactcactataaggactcactatttgttttcgcgcccagttgcaaaaagtgtcgacatttgcttctgacacaactgtgttcactagcaacctcaaacagacaccgccaccatggtgcctgccgccaagagagtgaagctggacggcagcaaccacgaccaagagttcgaccctcctaaggtgtaccctcctgtgccagccgagaagcggaagcctatcagagtgctgagcctgttcgacggaatcgccacaggactgctggtgctgaaggatctgggaatccaggtggaccggtatatcgccagcgaagtgtgcgaggacagcatcacagttggcatggttcgacaccagggcaagattatgtacgtgggcgacgtgcggagcgtgacccagaaacacattcaagagtggggccccttcgacctggttatcggcggcagcccttgcaacgatctgagcatcgtgaaccccgccagaaagggcctgtatgaaggcaccggcagactgttcttcgagttctacagactgctgcacgacgccagacctaaagagggcgacgacagaccattcttctggctgttcgagaacgtggtggctatgggcgtgtccgacaagcgggacatcagccggtttctggaaagcaaccccgtgatgatcgacgccaaagaggtgtccgctgctcaccgggccagatacttttggggcaatctgcccggcatgaacagacctctggccagcaccgtgaacgacaagctggaactgcaagagtgcctggaacacggccggatcgccaagtttagcaaagtgcggaccatcaccaccaggtccaacagcatcaagcagggcaaagaccagcacttccccgtgttcatgaatgagaaagaggacatcctgtggtgcaccgagatggaaagagtgttcggcttccctgtgcactacaccgacgtgtccaacatgagcagactggccagacagaggctgctgggcagatcttggagcgtgccagtgatcagacacctgttcgcccctctgaaagaatacttcgcctgcgtgtccagcggcaacagcaacgccaatagcagaggccctagcttcagctctggactggtgcctttgagcctgagaggcagccacatgttcgagacagtgcctgtgtggcggagacagcccgttagagtgctgtccctgtttgaggacatcaagaaagagctgaccagcctgggcttcctggaaagcggatctgatcctggccagctgaagcacgtggtggacgtgaccgataccgtgcggaaggatgtggaagaatggggcccttttgatctggtgtacggcgccacacctcctctgggccacacatgtgatagacctccaagctggtatctgttccagttccaccggctgctgcagtacgctagacccaagcctggaagccccaggcctttcttttggatgttcgtggacaacctggtcctgaacaaagaggacctggacgtcgccagccggttcctcgaaatggaacctgtgacaatccccgacgtgcacggcggatctctgcagaatgctgtcagagtgtggtctaacatccccgccatcagaagcagcagacactgggcccttgtgtccgaggaagaactgtctctgctggcccagaacaagcagagcagcaagctggccgccaagtggcctacaaagctggtcaagaactgcttcctgcctctgcgcgagtacttcaagtatttcagcggcggacctagctctggcgcccctccacctagcggaggatctccagcaggatctcctaccagcaccgaggaaggcacaagcgagtctgccacacctgagtctggccctggcacatctacagagcctagcgagggatctgcccctggatctcctgctggcagccctacatctaccgaagagggaaccagcacagagccttccgaaggttctgctcctggcacaagcaccgagccaagcgagatgaacaacagccagggcagagtgaccttcgaggatgtgaccgtgaacttcacccaaggcgagtggcagagactgaaccccgagcagagaaacctgtaccgggacgtgatgctggaaaactacagcaacctggtgtccgtcggccagggcgagacaacaaagcctgacgtgatcctgcggctggaacagggaaaagagccttggctggaagaggaagaggtgctcggatctggacgggccgagaagaacggcgatattggcggacagatctggaagcctaaggacgtgaaagagagcctgagcggctctgaaacacctggaacaagcgaaggcggaccaggcacctctaccgaaccatctgagggaagcgctccaggttctcctgccggctctccaacaagcacagaagagggcacctccactgagccctctgaaggcagtgctcctggaacttccaccgaaccttccgagccaaagaagaaacgcaaggtgggctccgacaagaagtacagcatcggcctggccatcggcaccaactctgtgggctgggccgtgatcaccgacgagtacaaggtgcccagcaagaaattcaaggtgctgggcaacaccgaccggcacagcatcaagaagaacctgatcggcgccctgctgttcgacagcggagaaacagccgaggccacccggctgaagagaaccgccagaagaagatacaccagacggaagaaccggatctgctatctgcaagagatcttcagcaacgagatggccaaggtggacgacagcttcttccacagactggaagagtccttcctggtggaagaggataagaagcacgagcggcaccccatcttcggcaacatcgtggacgaggtggcctaccacgagaagtaccccaccatctaccacctgagaaagaaactggtggacagcaccgacaaggccgacctgcggctgatctatctggccctggcccacatgatcaagttccggggccacttcctgatcgagggcgacctgaaccccgacaacagcgacgtggacaagctgttcatccagctggtgcagacctacaaccagctgttcgaggaaaaccccatcaacgccagcggcgtggacgccaaggccatcctgtctgccagactgagcaagagcagacggctggaaaatctgatcgcccagctgcccggcgagaagaagaatggcctgttcggcaacctgattgccctgagcctgggcctgacccccaacttcaagagcaacttcgacctggccgaggatgccaaactgcagctgagcaaggacacctacgacgacgacctggacaacctgctggcccagatcggcgaccagtacgccgacctgtttctggccgccaagaacctgtccgacgccatcctgctgagcgacatcctgagagtgaacaccgagatcaccaaggcccccctgagcgcctctatgatcaagagatacgacgagcaccaccaggacctgaccctgctgaaagctctcgtgcggcagcagctgcctgagaagtacaaagagattttcttcgaccagagcaagaacggctacgccggctacatcgatggcggagccagccaggaagagttctacaagttcatcaagcccatcctggaaaagatggacggcaccgaggaactgctcgtgaagctgaacagagaggacctgctgcggaagcagcggaccttcgacaacggcagcatcccccaccagatccacctgggagagctgcacgccattctgcggcggcaggaagatttttacccattcctgaaggacaaccgggaaaagatcgagaagatcctgaccttccgcatcccctactacgtgggccctctggccaggggaaacagcagattcgcctggatgaccagaaagagcgaggaaaccatcaccccctggaacttcgaggaagtggtggacaagggcgccagcgcccagagcttcatcgagcggatgaccaacttcgataagaacctgcccaacgagaaggtgctgcccaagcacagcctgctgtacgagtacttcaccgtgtacaacgagctgaccaaagtgaaatacgtgaccgagggaatgagaaagcccgccttcctgagcggcgagcagaaaaaagccatcgtggacctgctgttcaagaccaaccggaaagtgaccgtgaagcagctgaaagaggactacttcaagaaaatcgagtgcttcgactccgtggaaatctccggcgtggaagatcggttcaacgcctccctgggcacataccacgatctgctgaaaattatcaaggacaaggacttcctggacaatgaggaaaacgaggacattctggaagatatcgtgctgaccctgacactgtttgaggacagagagatgatcgaggaacggctgaaaacctatgcccacctgttcgacgacaaagtgatgaagcagctgaagcggcggagatacaccggctggggcaggctgagccggaagctgatcaacggcatccgggacaagcagtccggcaagacaatcctggatttcctgaagtccgacggcttcgccaacagaaacttcatgcagctgatccacgacgacagcctgacctttaaagaggacatccagaaagcccaggtgtccggccagggcgatagcctgcacgagcacattgccaatctggccggcagccccgccattaagaagggcatcctgcagacagtgaaggtggtggacgagctcgtgaaagtgatgggccggcacaagcccgagaacatcgtgatcgaaatggccagagagaaccagaccacccagaagggacagaagaacagccgcgagagaatgaagcggatcgaagagggcatcaaagagctgggcagccagatcctgaaagaacaccccgtggaaaacacccagctgcagaacgagaagctgtacctgtactacctgcagaatgggcgggatatgtacgtggaccaggaactggacatcaaccggctgtccgactacgatgtggacgctatcgtgcctcagagctttctgaaggacgactccatcgataacaaagtgctgactcggagcgacaagaaccggggcaagagcgacaacgtgccctccgaagaggtcgtgaagaagatgaagaactactggcgccagctgctgaatgccaagctgattacccagaggaagttcgacaatctgaccaaggccgagagaggcggcctgagcgaactggataaggccggcttcatcaagagacagctggtggaaacccggcagatcacaaagcacgtggcacagatcctggactcccggatgaacactaagtacgacgagaacgacaaactgatccgggaagtgaaagtgatcaccctgaagtccaagctggtgtccgatttccggaaggatttccagttttacaaagtgcgcgagatcaacaactaccaccacgcccacgacgcctacctgaacgccgtcgtgggaaccgccctgatcaaaaagtaccctaagctggaaagcgagttcgtgtacggcgactacaaggtgtacgacgtgcggaagatgatcgccaagagcgagcaggaaatcggcaaggctaccgccaagtacttcttctacagcaacatcatgaactttttcaagaccgagattaccctggccaacggcgagatccggaagcggcctctgatcgagacaaacggcgaaacaggcgagatcgtgtgggataagggccgggactttgccaccgtgcggaaagtgctgtctatgccccaagtgaatatcgtgaaaaagaccgaggtgcagacaggcggcttcagcaaagagtctatcctgcccaagaggaacagcgacaagctgatcgccagaaagaaggactgggaccctaagaagtacggcggcttcgacagccccaccgtggcctattctgtgctggtggtggccaaagtggaaaagggcaagtccaagaaactgaagagtgtgaaagagctgctggggatcaccatcatggaaagaagcagcttcgagaagaatcccatcgactttctggaagccaagggctacaaagaagtgaaaaaggacctgatcatcaagctgcctaagtactccctgttcgagctggaaaacggccggaagagaatgctggcctctgccggcgaactgcagaagggaaacgaactggccctgccctccaaatatgtgaacttcctgtacctggccagccactatgagaagctgaagggctcccccgaggataatgagcagaaacagctgtttgtggaacagcacaaacactacctggacgagatcatcgagcagatcagcgagttctccaagagagtgatcctggccgacgctaatctggacaaggtgctgagcgcctacaacaagcacagagacaagcctatcagagagcaggccgagaatatcatccacctgtttaccctgaccaatctgggagcccctgccgccttcaagtactttgacaccaccatcgaccggaagaggtacaccagcaccaaagaggtgctggacgccaccctgatccaccagagcatcaccggcctgtacgagacacggatcgacctgtctcagctgggaggcgacgcctatccctatgacgtgcccgattatgccagcctgggcagcggctcccccaagaaaaaacgcaaggtggaagatcctaagaaaaagcggaaagtg

SEQ ID NO: 158 - DNA, 10002 bp, synthetic construct
  misc_feature 1..10002: note = V40 DNA
  source 1..10002: mol_type = other DNA
tatatactttagattgatttaaaacttcatttttaatttaaaaggatctaggtgaagatcctttttgataatctcatgaccaaaatcccttaacgtgagttttcgttccactgagcgtcagaccccgtagaaaagatcaaaggatcttcttgagatcctttttttctgcgcgtaatctgctgcttgcaaacaaaaaaaccaccgctaccagcggtggtttgtttgccggatcaagagctaccaactctttttccgaaggtaactggcttcagcagagcgcagataccaaatactgttcttctagtgtagccgtagttaggccaccacttcaagaactctgtagcaccgcctacatacctcgctctgctaatcctgttaccagtggctgctgccagtggcgataagtcgtgtcttaccgggttggactcaagacgatagttaccggataaggcgcagcggtcgggctgaacggggggttcgtgcacacagcccagcttggagcgaacgacctacaccgaactgagatacctacagcgtgagctatgagaaagcgccacgcttcccgaagggagaaaggcggacaggtatccggtaagcggcagggtcggaacaggagagcgcacgagggagcttccagggggaaacgcctggtatctttatagtcctgtcgggtttcgccacctctgacttgagcgtcgatttttgtgatgctcgtcaggggggcggagcctatggaaaaacgccagcaacgcggcctttttacggttcctggccttttgctggccttttgctcacatgttctttcctgcgttatcccctgattctgtggataaccgtattaccgcctttgagtgagctgataccgctcgccgcagccgaacgaccgagcgcagcgagtcagtgagcgaggaagcggaagagcgcccaatacgcaaaccgcctctccccgcgcgttggccgattcattaatgcagctggcacgacaggtttcccgactggaaagcgggcagtgagcgcaacgcaattaatgtgagttagctcactcattaggcaccccaggctttacactttatgcttccggctcgtatgttgtgtggaattgtgagcggataacaatttcacacaggaaacagctatgaccatgattacgcctctagaaagctttaatacgactcactataaggactcactatttgttttcgcgcccagttgcaaaaagtgtcgacatttgcttctgacacaactgtgttcactagcaacctcaaacagacaccgccaccatgcctgctgctaagagagtgaaactggatggatccaaccatgaccaggaatttgaccccccaaaggtttacccacctgtgccagctgagaagaggaagcccatccgcgtgctgtctctctttgatgggattgctacagggctcctggtgctgaaggacctgggcatccaagtggaccgctacattgcctccgaggtgtgtgaggactccatcacggtgggcatggtgcggcaccagggaaagatcatgtacgtcggggacgtccgcagcgtcacacagaagcatatccaggagtggggcccattcgacctggtgattggaggcagtccctgcaatgacctctccattgtcaaccctgcccgcaagggactttatgagggtactggccgcctcttctttgagttctaccgcctcctgcatgatgcgcggcccaaggagggagatgatcgccccttcttctggctctttgagaatgtggtggccatgggcgttagtgacaagagggacatctcgcgatttcttgagtctaaccccgtgatgattgacgccaaagaagtgtctgctgcacacagggcccgttacttctggggtaaccttcctggcatgaacaggcctttggcatccactgtgaatgataagctggagctgcaagagtgtctggagcacggcagaatagccaagttcagcaaagtgaggaccattaccaccaggtcaaactctataaagcagggcaaagaccagcatttccccgtcttcatgaacgagaaggaggacatcctgtggtgcactgaaatggaaagggtgtttggcttccccgtccactacacagacgtctccaacatgagccgcttggcgaggcagagactgctgggccgatcgtggagcgtgccggtcatccgccacctcttcgctccgctgaaggaatattttgcttgtgtgtctagcggcaatagtaacgctaacagccgcgggccgagcttcagcagcggcctggtgccgttaagcttgcgcggcagccatatgttcgaaaccgtgcctgtgtggaggagacagccagtccgggtgctgtccctttttgaagacatcaagaaagagctgacgagtttgggctttttggaaagtggttctgacccgggacaactgaagcatgtggttgatgtcacagacacagtgaggaaggatgtggaggagtggggacccttcgatcttgtgtacggcgccacacctcccctgggccacacctgtgaccgtcctcccagctggtacctgttccagttccaccggctcctgcagtacgcacggcccaagccaggcagccccaggcccttcttctggatgttcgtggacaatctggtgctgaacaaggaagacctggacgtcgcatctcgcttcctggagatggagccagtcaccatcccagatgtccacggcggatccttgcagaatgctgtccgcgtgtggagcaacatcccagccataaggagcagcaggcactgggctctggtttcggaagaagaattgtccctgctggcccagaacaagcagagctcgaagctcgcggccaagtggcccaccaagctggtgaagaactgctttctccccctaagagaatatttcaagtatttttcaggagggccgagctctggcgcacccccaccaagtggagggtctcctgccgggtccccaacatctactgaagaaggcaccagcgaatccgcaacgcccgagtcaggccctggtacctccacagaaccatctgaaggtagtgcgcctggttccccagctggaagccctacttccaccgaagaaggcacgtcaaccgaaccaagtgaaggatctgcccctgggaccagcactgaaccatctgagcggacactcgagctgttccgcgacgtggccattgtgttctctcaagaggaatggcagtggctggcccctgctcagagagatctctaccgcgacgttatgctggagacatactccaatctcgtgtccctcggcctggccgtgtccaaacctgatgtgatcagcttcctcgagcagggaaaagaaccttggatgagcggcagcgagacccccggtaccagcgagtccggccctggcacctccacagaaccatctgaaggtagtgcgcctggttccccagctggaagccctacttccaccgaagaaggcacgtcaaccgaaccaagtgaaggatctgcccctgggaccagcactgaaccatctgagccaaaaaagaagagaaaggtaatggacaagaagtacagcatcggcctggccatcggcaccaactctgtgggctgggccgtgatcaccgacgagtacaaggtgcccagcaagaaattcaaggtgctgggcaacaccgaccggcacagcatcaagaagaacctgatcggcgccctgctgttcgacagcggagaaacagccgaggccacccggctgaagagaaccgccagaagaagatacaccagacggaagaaccggatctgctatctgcaagagatcttcagcaacgagatggccaaggtggacgacagcttcttccacagactggaagagtccttcctggtggaagaggataagaagcacgagcggcaccccatcttcggcaacatcgtggacgaggtggcctaccacgagaagtaccccaccatctaccacctgagaaagaaactggtggacagcaccgacaaggccgacctgcggctgatctatctggccctggcccacatgatcaagttccggggccacttcctgatcgagggcgacctgaaccccgacaacagcgacgtggacaagctgttcatccagctggtgcagacctacaaccagctgttcgaggaaaaccccatcaacgccagcggcgtggacgccaaggccatcctgtctgccagactgagcaagagcagacggctggaaaatctgatcgcccagctgcccggcgagaagaagaatggcctgttcggcaacctgattgccctgagcctgggcctgacccccaacttcaagagcaacttcgacctggccgaggatgccaaactgcagctgagcaaggacacctacgacgacgacctggacaacctgctggcccagatcggcgaccagtacgccgacctgtttctggccgccaagaacctgtccgacgccatcctgctgagcgacatcctgagagtgaacaccgagatcaccaaggcccccctgagcgcctctatgatcaagagatacgacgagcaccaccaggacctgaccctgctgaaagctctcgtgcggcagcagctgcctgagaagtacaaagagattttcttcgaccagagcaagaacggctacgccggctacatcgatggcggagccagccaggaagagttctacaagttcatcaagcccatcctggaaaagatggacggcaccgaggaactgctcgtgaagctgaacagagaggacctgctgcggaagcagcggaccttcgacaacggcagcatcccccaccagatccacctgggagagctgcacgccattctgcggcggcaggaagatttttacccattcctgaaggacaaccgggaaaagatcgagaagatcctgaccttccgcatcccctactacgtgggccctctggccaggggaaacagcagattcgcctggatgaccagaaagagcgaggaaaccatcaccccctggaacttcgaggaagtggtggacaagggcgccagcgcccagagcttcatcgagcggatgaccaacttcgataagaacctgcccaacgagaaggtgctgcccaagcacagcctgctgtacgagtacttcaccgtgtacaacgagctgaccaaagtgaaatacgtgaccgagggaatgagaaagcccgccttcctgagcggcgagcagaaaaaagccatcgtggacctgctgttcaagaccaaccggaaagtgaccgtgaagcagctgaaagaggactacttcaagaaaatcgagtgcttcgactccgtggaaatctccggcgtggaagatcggttcaacgcctccctgggcacataccacgatctgctgaaaattatcaaggacaaggacttcctggacaatgaggaaaacgaggacattctggaagatatcgtgctgaccctgacactgtttgaggacagagagatgatcgaggaacggctgaaaacctatgcccacctgttcgacgacaaagtgatgaagcagctgaagcggcggagatacaccggctggggcaggctgagccggaagctgatcaacggcatccgggacaagcagtccggcaagacaatcctggatttcctgaagtccgacggcttcgccaacagaaacttcatgcagctgatccacgacgacagcctgacctttaaagaggacatccagaaagcccaggtgtccggccagggcgatagcctgcacgagcacattgccaatctggccggcagccccgccattaagaagggcatcctgcagacagtgaaggtggtggacgagctcgtgaaagtgatgggccggcacaagcccgagaacatcgtgatcgaaatggccagagagaaccagaccacccagaagggacagaagaacagccgcgagagaatgaagcggatcgaagagggcatcaaagagctgggcagccagatcctgaaagaacaccccgtggaaaacacccagctgcagaacgagaagctgtacctgtactacctgcagaatgggcgggatatgtacgtggaccaggaactggacatcaaccggctgtccgactacgatgtggacgctatcgtgcctcagagctttctgaaggacgactccatcgataacaaagtgctgactcggagcgacaagaaccggggcaagagcgacaacgtgccctccgaagaggtcgtgaagaagatgaagaactactggcgccagctgctgaatgccaagctgattacccagaggaagttcgacaatctgaccaaggccgagagaggcggcctgagcgaactggataaggccggcttcatcaagagacagctggtggaaacccggcagatcacaaagcacgtggcacagatcctggactcccggatgaacactaagtacgacgagaacgacaaactgatccgggaagtgaaagtgatcaccctgaagtccaagctggtgtccgatttccggaaggatttccagttttacaaagtgcgcgagatcaacaactaccaccacgcccacgacgcctacctgaacgccgtcgtgggaaccgccctgatcaaaaagtaccctaagctggaaagcgagttcgtgtacggcgactacaaggtgtacgacgtgcggaagatgatcgccaagagcgagcaggaaatcggcaaggctaccgccaagtacttcttctacagcaacatcatgaactttttcaagaccgagattaccctggccaacggcgagatccggaagcggcctctgatcgagacaaacggcgaaacaggcgagatcgtgtgggataagggccgggactttgccaccgtgcggaaagtgctgtctatgccccaagtgaatatcgtgaaaaagaccgaggtgcagacaggcggcttcagcaaagagtctatcctgcccaagaggaacagcgacaagctgatcgccagaaagaaggactgggaccctaagaagtacggcggcttcgacagccccaccgtggcctattctgtgctggtggtggccaaagtggaaaagggcaagtccaagaaactgaagagtgtgaaagagctgctggggatcaccatcatggaaagaagcagcttcgagaagaatcccatcgactttctggaagccaagggctacaaagaagtgaaaaaggacctgatcatcaagctgcctaagtactccctgttcgagctggaaaacggccggaagagaatgctggcctctgccggcgaactgcagaagggaaacgaactggccctgccctccaaatatgtgaacttcctgtacctggccagccactatgagaagctgaagggctcccccgaggataatgagcagaaacagctgtttgtggaacagcacaaacactacctggacgagatcatcgagcagatcagcgagttctccaagagagtgatcctggccgacgctaatctggacaaggtgctgagcgcctacaacaagcacagagacaagcctatcagagagcaggccgagaatatcatccacctgtttaccctgaccaatctgggagcccctgccgccttcaagtactttgacaccaccatcgaccggaagaggtacaccagcaccaaagaggtgctggacgccaccctgatccaccagagcatcaccggcctgtacgagacacggatcgacctgtctcagctgggaggcgacgcctatccctatgacgtgcccgattatgccagcctgggcagcggctcccccaagaaaaaacgcaaggtggaagatcctaagaaaaagcggaaagtggacggcctcgaggctactaacttcagcctgctgaagcaggctggagacgtggaggagaaccctggacctatgcattaatgagatcccaagcacgcagcaatgcagctcaaaacgcttagcctagccacacccccacgggaaacagcagtgattaacctttagcaataaacgaaagtttaactaagctatactaaccccagggttggtcaatttcgtgccagccacaccctggtactgcatgcacgcaatgctagctgcccctttcccgtcctgggcaccccgagtctcccccgaccccgggtcccaggtatgctcccacctccacctgccccactcaccacctctgctagttccagacacctccgagacgaggaaaaaaaaaaaaaaaaaaaaaaaaaaaaaaaaaaaaaaaaaaaaaaaaaaaaaaaaaaaaaaaaaaaaaaaaaaaaaaaaaaaaaaaaaaaaaaaaaaaaaaaaaaaaaaaaaaaaaaaaaaaaaaaaaaaaaaaaaaaaaaaaaaaaaaaaaaaaaaaaaaaaaaaaaaaaaaaaaaaaaaaaaaaaaaaaaaaaaaaaaaaaaaaaaaaaaaaaaaaaaaaaaaaaaaaaaaaaaaaaaaaaaaaaaaaaaaaaaaaaaaaaaaaaaaaaaaaaaaaaaaaaaaaaaaaaaaaaaaaaaaaaaaaaaaaaaaaaaaaaaaaaaaaaaaaaaaaaaaaaaaaaaaaaaaaaaaaaaaaaaaaaaaaaaaaaaaaaaaaaaaaaaaaaaaaaaaccgtcttcaagctttctagaaattcactggccgtcgttttacaacgtcgtgactgggaaaaccctggcgttacccaacttaatcgccttgcagcacatccccctttcgccagctggcgtaatagcgaagaggcccgcaccgatcgcccttcccaacagttgcgcagcctgaatggcgaatggcgcctgatgcggtattttctccttacgcatctgtgcggtatttcacaccgcatatggtgcactctcagtacaatctgctctgatgccgcatagttaagccagccccgacacccgccaacacccgctgacgcgccctgacgggcttgtctgctcccggcatccgcttacagacaagctgtgaccgtctccgggagctgcatgtgtcagaggttttcaccgtcatcaccgaaacgcgcgagacgaaagggcctcgtgatacgcctatttttataggttaatgtcatgataataatggtttcttagacgtcaggtggcacttttcggggaaatgtgcgcggaacccctatttgtttatttttctaaatacattcaaatatgtatccgctcatgagacaataaccctgataaatgcttcaataatattgaaaaaggaagagtatgagtattcaacatttccgtgtcgcccttattcccttttttgcggcattttgccttcctgtttttgctcacccagaaacgctggtgaaagtaaaagatgctgaagatcagttgggtgcacgagtgggttacatcgaactggatctcaacagcggtaagatccttgagagttttcgccccgaagaacgttttccaatgatgagcacttttaaagttctgctatgtggcgcggtattatcccgtattgacgccgggcaagagcaactcggtcgccgcatacactattctcagaatgacttggttgagtactcaccagtcacagaaaagcatcttacggatggcatgacagtaagagaattatgcagtgctgccataaccatgagtgataacactgcggccaacttacttctgacaacgatcggaggaccgaaggagctaaccgcttttttgcacaacatgggggatcatgtaactcgccttgatcgttgggaaccggagctgaatgaagccataccaaacgacgagcgtgacaccacgatgcctgtagcaatggcaacaacgttgcgcaaactattaactggcgaactacttactctagcttcccggcaacaattaatagactggatggaggcggataaagttgcaggaccacttctgcgctcggcccttccggctggctggtttattgctgataaatctggagccggtgagcgtgggtctcgcggtatcattgcagcactggggccagatggtaagccctcccgtatcgtagttatctacacgacggggagtcaggcaactatggatgaacgaaatagacagatcgctgagataggtgcctcactgattaagcattggtaactgtcagaccaagtttactca

SEQ ID NO: 159 - DNA, 10002 bp, synthetic construct
  misc_feature 1..10002: note = V41 DNA
  source 1..10002: mol_type = other DNA
tgatttaaaacttcatttttaatttaaaaggatctaggtgaagatcctttttgataatctcatgaccaaaatcccttaacgtgagttttcgttccactgagcgtcagaccccgtagaaaagatcaaaggatcttcttgagatcctttttttctgcgcgtaatctgctgcttgcaaacaaaaaaaccaccgctaccagcggtggtttgtttgccggatcaagagctaccaactctttttccgaaggtaactggcttcagcagagcgcagataccaaatactgttcttctagtgtagccgtagttaggccaccacttcaagaactctgtagcaccgcctacatacctcgctctgctaatcctgttaccagtggctgctgccagtggcgataagtcgtgtcttaccgggttggactcaagacgatagttaccggataaggcgcagcggtcgggctgaacggggggttcgtgcacacagcccagcttggagcgaacgacctacaccgaactgagatacctacagcgtgagctatgagaaagcgccacgcttcccgaagggagaaaggcggacaggtatccggtaagcggcagggtcggaacaggagagcgcacgagggagcttccagggggaaacgcctggtatctttatagtcctgtcgggtttcgccacctctgacttgagcgtcgatttttgtgatgctcgtcaggggggcggagcctatggaaaaacgccagcaacgcggcctttttacggttcctggccttttgctggccttttgctcacatgttctttcctgcgttatcccctgattctgtggataaccgtattaccgcctttgagtgagctgataccgctcgccgcagccgaacgaccgagcgcagcgagtcagtgagcgaggaagcggaagagcgcccaatacgcaaaccgcctctccccgcgcgttggccgattcattaatgcagctggcacgacaggtttcccgactggaaagcgggcagtgagcgcaacgcaattaatgtgagttagctcactcattaggcaccccaggctttacactttatgcttccggctcgtatgttgtgtggaattgtgagcggataacaatttcacacaggaaacagctatgaccatgattacgcctctagaaagctttaatacgactcactataaggactcactatttgttttcgcgcccagttgcaaaaagtgtcgacatttgcttctgacacaactgtgttcactagcaacctcaaacagacaccgccaccatgcctgctgctaagagagtgaaactggatggatccaaccatgaccaggaatttgaccccccaaaggtttacccacctgtgccagctgagaagaggaagcccatccgcgtgctgtctctctttgatgggattgctacagggctcctggtgctgaaggacctgggcatccaagtggaccgctacattgcctccgaggtgtgtgaggactccatcacggtgggcatggtgcggcaccagggaaagatcatgtacgtcggggacgtccgcagcgtcacacagaagcatatccaggagtggggcccattcgacctggtgattggaggcagtccctgcaatgacctctccattgtcaaccctgcccgcaagggactttatgagggtactggccgcctcttctttgagttctaccgcctcctgcatgatgcgcggcccaaggagggagatgatcgccccttcttctggctctttgagaatgtggtggccatgggcgttagtgacaagagggacatctcgcgatttcttgagtctaaccccgtgatgattgacgccaaagaagtgtctgctgcacacagggcccgttacttctggggtaaccttcctggcatgaacaggcctttggcatccactgtgaatgataagctggagctgcaagagtgtctggagcacggcagaatagccaagttcagcaaagtgaggaccattaccaccaggtcaaactctataaagcagggcaaagaccagcatttccccgtcttcatgaacgagaaggaggacatcctgtggtgcactgaaatggaaagggtgtttggcttccccgtccactacacagacgtctccaacatgagccgcttggcgaggcagagactgctgggccgatcgtggagcgtgccggtcatccgccacctcttcgctccgctgaaggaatattttgcttgtgtgtctagcggcaatagtaacgctaacagccgcgggccgagcttcagcagcggcctggtgccgttaagcttgcgcggcagccatatgttcgaaaccgtgcctgtgtggaggagacagccagtccgggtgctgtccctttttgaagacatcaagaaagagctgacgagtttgggctttttggaaagtggttctgacccgggacaactgaagcatgtggttgatgtcacagacacagtgaggaaggatgtggaggagtggggacccttcgatcttgtgtacggcgccacacctcccctgggccacacctgtgaccgtcctcccagctggtacctgttccagttccaccggctcctgcagtacgcacggcccaagccaggcagccccaggcccttcttctggatgttcgtggacaatctggtgctgaacaaggaagacctggacgtcgcatctcgcttcctggagatggagccagtcaccatcccagatgtccacggcggatccttgcagaatgctgtccgcgtgtggagcaacatcccagccataaggagcagcaggcactgggctctggtttcggaagaagaattgtccctgctggcccagaacaagcagagctcgaagctcgcggccaagtggcccaccaagctggtgaagaactgctttctccccctaagagaatatttcaagtatttttcaggagggccgagctctggcgcacccccaccaagtggagggtctcctgccgggtccccaacatctactgaagaaggcaccagcgaatccgcaacgcccgagtcaggccctggtacctccacagaaccatctgaaggtagtgcgcctggttccccagctggaagccctacttccaccgaagaaggcacgtcaaccgaaccaagtgaaggatctgcccctgggaccagcactgaaccatctgagcggacactcatggcctttgaggacgtcgccgtgtatttttcccaagaagaatggggactgctcgacactgcccagagagccctgtatcgcagagtcatgctggacaacttcgccctggtggcctccctgggcctgtctacaagcagacccagagtggtcattcagctggaaagaggcgaggaaccctgggtcagcggcagcgagacccccggtaccagcgagggcggccctggcacctccacagaaccatctgaaggtagtgcgcctggttccccagctggaagccctacttccaccgaagaaggcacgtcaaccgaaccaagtgaaggatctgcccctgggaccagcactgaaccatctgagccaaaaaagaagagaaaggtaatggacaagaagtacagcatcggcctggccatcggcaccaactctgtgggctgggccgtgatcaccgacgagtacaaggtgcccagcaagaaattcaaggtgctgggcaacaccgaccggcacagcatcaagaagaacctgatcggcgccctgctgttcgacagcggagaaacagccgaggccacccggctgaagagaaccgccagaagaagatacaccagacggaagaaccggatctgctatctgcaagagatcttcagcaacgagatggccaaggtggacgacagcttcttccacagactggaagagtccttcctggtggaagaggataagaagcacgagcggcaccccatcttcggcaacatcgtggacgaggtggcctaccacgagaagtaccccaccatctaccacctgagaaagaaactggtggacagcaccgacaaggccgacctgcggctgatctatctggccctggcccacatgatcaagttccggggccacttcctgatcgagggcgacctgaaccccgacaacagcgacgtggacaagctgttcatccagctggtgcagacctacaaccagctgttcgaggaaaaccccatcaacgccagcggcgtggacgccaaggccatcctgtctgccagactgagcaagagcagacggctggaaaatctgatcgcccagctgcccggcgagaagaagaatggcctgttcggcaacctgattgccctgagcctgggcctgacccccaacttcaagagcaacttcgacctggccgaggatgccaaactgcagctgagcaaggacacctacgacgacgacctggacaacctgctggcccagatcggcgaccagtacgccgacctgtttctggccgccaagaacctgtccgacgccatcctgctgagcgacatcctgagagtgaacaccgagatcaccaaggcccccctgagcgcctctatgatcaagagatacgacgagcaccaccaggacctgaccctgctgaaagctctcgtgcggcagcagctgcctgagaagtacaaagagattttcttcgaccagagcaagaacggctacgccggctacatcgatggcggagccagccaggaagagttctacaagttcatcaagcccatcctggaaaagatggacggcaccgaggaactgctcgtgaagctgaacagagaggacctgctgcggaagcagcggaccttcgacaacggcagcatcccccaccagatccacctgggagagctgcacgccattctgcggcggcaggaagatttttacccattcctgaaggacaaccgggaaaagatcgagaagatcctgaccttccgcatcccctactacgtgggccctctggccaggggaaacagcagattcgcctggatgaccagaaagagcgaggaaaccatcaccccctggaacttcgaggaagtggtggacaagggcgccagcgcccagagcttcatcgagcggatgaccaacttcgataagaacctgcccaacgagaaggtgctgcccaagcacagcctgctgtacgagtacttcaccgtgtacaacgagctgaccaaagtgaaatacgtgaccgagggaatgagaaagcccgccttcctgagcggcgagcagaaaaaagccatcgtggacctgctgttcaagaccaaccggaaagtgaccgtgaagcagctgaaagaggactacttcaagaaaatcgagtgcttcgactccgtggaaatctccggcgtggaagatcggttcaacgcctccctgggcacataccacgatctgctgaaaattatcaaggacaaggacttcctggacaatgaggaaaacgaggacattctggaagatatcgtgctgaccctgacactgtttgaggacagagagatgatcgaggaacggctgaaaacctatgcccacctgttcgacgacaaagtgatgaagcagctgaagcggcggagatacaccggctggggcaggctgagccggaagctgatcaacggcatccgggacaagcagtccggcaagacaatcctggatttcctgaagtccgacggcttcgccaacagaaacttcatgcagctgatccacgacgacagcctgacctttaaagaggacatccagaaagcccaggtgtccggccagggcgatagcctgcacgagcacattgccaatctggccggcagccccgccattaagaagggcatcctgcagacagtgaaggtggtggacgagctcgtgaaagtgatgggccggcacaagcccgagaacatcgtgatcgaaatggccagagagaaccagaccacccagaagggacagaagaacagccgcgagagaatgaagcggatcgaagagggcatcaaagagctgggcagccagatcctgaaagaacaccccgtggaaaacacccagctgcagaacgagaagctgtacctgtactacctgcagaatgggcgggatatgtacgtggaccaggaactggacatcaaccggctgtccgactacgatgtggacgctatcgtgcctcagagctttctgaaggacgactccatcgataacaaagtgctgactcggagcgacaagaaccggggcaagagcgacaacgtgccctccgaagaggtcgtgaagaagatgaagaactactggcgccagctgctgaatgccaagctgattacccagaggaagttcgacaatctgaccaaggccgagagaggcggcctgagcgaactggataaggccggcttcatcaagagacagctggtggaaacccggcagatcacaaagcacgtggcacagatcctggactcccggatgaacactaagtacgacgagaacgacaaactgatccgggaagtgaaagtgatcaccctgaagtccaagctggtgtccgatttccggaaggatttccagttttacaaagtgcgcgagatcaacaactaccaccacgcccacgacgcctacctgaacgccgtcgtgggaaccgccctgatcaaaaagtaccctaagctggaaagcgagttcgtgtacggcgactacaaggtgtacgacgtgcggaagatgatcgccaagagcgagcaggaaatcggcaaggctaccgccaagtacttcttctacagcaacatcatgaactttttcaagaccgagattaccctggccaacggcgagatccggaagcggcctctgatcgagacaaacggcgaaacaggcgagatcgtgtgggataagggccgggactttgccaccgtgcggaaagtgctgtctatgccccaagtgaatatcgtgaaaaagaccgaggtgcagacaggcggcttcagcaaagagtctatcctgcccaagaggaacagcgacaagctgatcgccagaaagaaggactgggaccctaagaagtacggcggcttcgacagccccaccgtggcctattctgtgctggtggtggccaaagtggaaaagggcaagtccaagaaactgaagagtgtgaaagagctgctggggatcaccatcatggaaagaagcagcttcgagaagaatcccatcgactttctggaagccaagggctacaaagaagtgaaaaaggacctgatcatcaagctgcctaagtactccctgttcgagctggaaaacggccggaagagaatgctggcctctgccggcgaactgcagaagggaaacgaactggccctgccctccaaatatgtgaacttcctgtacctggccagccactatgagaagctgaagggctcccccgaggataatgagcagaaacagctgtttgtggaacagcacaaacactacctggacgagatcatcgagcagatcagcgagttctccaagagagtgatcctggccgacgctaatctggacaaggtgctgagcgcctacaacaagcacagagacaagcctatcagagagcaggccgagaatatcatccacctgtttaccctgaccaatctgggagcccctgccgccttcaagtactttgacaccaccatcgaccggaagaggtacaccagcaccaaagaggtgctggacgccaccctgatccaccagagcatcaccggcctgtacgagacacggatcgacctgtctcagctgggaggcgacgcctatccctatgacgtgcccgattatgccagcctgggcagcggctcccccaagaaaaaacgcaaggtggaagatcctaagaaaaagcggaaagtggacggcctcgaggctactaacttcagcctgctgaagcaggctggagacgtggaggagaaccctggacctatgcattaatgagatcccaagcacgcagcaatgcagctcaaaacgcttagcctagccacacccccacgggaaacagcagtgattaacctttagcaataaacgaaagtttaactaagctatactaaccccagggttggtcaatttcgtgccagccacaccctggtactgcatgcacgcaatgctagctgcccctttcccgtcctgggcaccccgagtctcccccgaccccgggtcccaggtatgctcccacctccacctgccccactcaccacctctgctagttccagacacctccgagacgaggaaaaaaaaaaaaaaaaaaaaaaaaaaaaaaaaaaaaaaaaaaaaaaaaaaaaaaaaaaaaaaaaaaaaaaaaaaaaaaaaaaaaaaaaaaaaaaaaaaaaaaaaaaaaaaaaaaaaaaaaaaaaaaaaaaaaaaaaaaaaaaaaaaaaaaaaaaaaaaaaaaaaaaaaaaaaaaaaaaaaaaaaaaaaaaaaaaaaaaaaaaaaaaaaaaaaaaaaaaaaaaaaaaaaaaaaaaaaaaaaaaaaaaaaaaaaaaaaaaaaaaaaaaaaaaaaaaaaaaaaaaaaaaaaaaaaaaaaaaaaaaaaaaaaaaaaaaaaaaaaaaaaaaaaaaaaaaaaaaaaaaaaaaaaaaaaaaaaaaaaaaaaaaaaaaaaaaaaaaaaaaaaaaaaaaaaaaccgtcttcaagctttctagaaattcactggccgtcgttttacaacgtcgtgactgggaaaaccctggcgttacccaacttaatcgccttgcagcacatccccctttcgccagctggcgtaatagcgaagaggcccgcaccgatcgcccttcccaacagttgcgcagcctgaatggcgaatggcgcctgatgcggtattttctccttacgcatctgtgcggtatttcacaccgcatatggtgcactctcagtacaatctgctctgatgccgcatagttaagccagccccgacacccgccaacacccgctgacgcgccctgacgggcttgtctgctcccggcatccgcttacagacaagctgtgaccgtctccgggagctgcatgtgtcagaggttttcaccgtcatcaccgaaacgcgcgagacgaaagggcctcgtgatacgcctatttttataggttaatgtcatgataataatggtttcttagacgtcaggtggcacttttcggggaaatgtgcgcggaacccctatttgtttatttttctaaatacattcaaatatgtatccgctcatgagacaataaccctgataaatgcttcaataatattgaaaaaggaagagtatgagtattcaacatttccgtgtcgcccttattcccttttttgcggcattttgccttcctgtttttgctcacccagaaacgctggtgaaagtaaaagatgctgaagatcagttgggtgcacgagtgggttacatcgaactggatctcaacagcggtaagatccttgagagttttcgccccgaagaacgttttccaatgatgagcacttttaaagttctgctatgtggcgcggtattatcccgtattgacgccgggcaagagcaactcggtcgccgcatacactattctcagaatgacttggttgagtactcaccagtcacagaaaagcatcttacggatggcatgacagtaagagaattatgcagtgctgccataaccatgagtgataacactgcggccaacttacttctgacaacgatcggaggaccgaaggagctaaccgcttttttgcacaacatgggggatcatgtaactcgccttgatcgttgggaaccggagctgaatgaagccataccaaacgacgagcgtgacaccacgatgcctgtagcaatggcaacaacgttgcgcaaactattaactggcgaactacttactctagcttcccggcaacaattaatagactggatggaggcggataaagttgcaggaccacttctgcgctcggcccttccggctggctggtttattgctgataaatctggagccggtgagcgtgggtctcgcggtatcattgcagcactggggccagatggtaagccctcccgtatcgtagttatctacacgacggggagtcaggcaactatggatgaacgaaatagacagatcgctgagataggtgcctcactgattaagcattggtaactgtcagaccaagtttactcatatatactttagat

SEQ ID NO: 160 - DNA, 10806 bp, synthetic construct
  misc_feature 1..10806: note = V42 DNA
  source 1..10806: mol_type = other DNA
cagaccccgtagaaaagatcaaaggatcttcttgagatcctttttttctgcgcgtaatctgctgcttgcaaacaaaaaaaccaccgctaccagcggtggtttgtttgccggatcaagagctaccaactctttttccgaaggtaactggcttcagcagagcgcagataccaaatactgttcttctagtgtagccgtagttaggccaccacttcaagaactctgtagcaccgcctacatacctcgctctgctaatcctgttaccagtggctgctgccagtggcgataagtcgtgtcttaccgggttggactcaagacgatagttaccggataaggcgcagcggtcgggctgaacggggggttcgtgcacacagcccagcttggagcgaacgacctacaccgaactgagatacctacagcgtgagctatgagaaagcgccacgcttcccgaagggagaaaggcggacaggtatccggtaagcggcagggtcggaacaggagagcgcacgagggagcttccagggggaaacgcctggtatctttatagtcctgtcgggtttcgccacctctgacttgagcgtcgatttttgtgatgctcgtcaggggggcggagcctatggaaaaacgccagcaacgcggcctttttacggttcctggccttttgctggccttttgctcacatgttctttcctgcgttatcccctgattctgtggataaccgtattaccgcctttgagtgagctgataccgctcgccgcagccgaacgaccgagcgcagcgagtcagtgagcgaggaagcggaagagcgcccaatacgcaaaccgcctctccccgcgcgttggccgattcattaatgcagctggcacgacaggtttcccgactggaaagcgggcagtgagcgcaacgcaattaatgtgagttagctcactcattaggcaccccaggctttacactttatgcttccggctcgtatgttgtgtggaattgtgagcggataacaatttcacacaggaaacagctatgaccatgattacgcctctagaaagctttaatacgactcactataaggactcactatttgttttcgcgcccagttgcaaaaagtgtcgacatttgcttctgacacaactgtgttcactagcaacctcaaacagacaccgccaccatgcctgctgctaagagagtgaaactggatggatccaaccatgaccaggaatttgaccccccaaaggtttacccacctgtgccagctgagaagaggaagcccatccgcgtgctgtctctctttgatgggattgctacagggctcctggtgctgaaggacctgggcatccaagtggaccgctacattgcctccgaggtgtgtgaggactccatcacggtgggcatggtgcggcaccagggaaagatcatgtacgtcggggacgtccgcagcgtcacacagaagcatatccaggagtggggcccattcgacctggtgattggaggcagtccctgcaatgacctctccattgtcaaccctgcccgcaagggactttatgagggtactggccgcctcttctttgagttctaccgcctcctgcatgatgcgcggcccaaggagggagatgatcgccccttcttctggctctttgagaatgtggtggccatgggcgttagtgacaagagggacatctcgcgatttcttgagtctaaccccgtgatgattgacgccaaagaagtgtctgctgcacacagggcccgttacttctggggtaaccttcctggcatgaacaggcctttggcatccactgtgaatgataagctggagctgcaagagtgtctggagcacggcagaatagccaagttcagcaaagtgaggaccattaccaccaggtcaaactctataaagcagggcaaagaccagcatttccccgtcttcatgaacgagaaggaggacatcctgtggtgcactgaaatggaaagggtgtttggcttccccgtccactacacagacgtctccaacatgagccgcttggcgaggcagagactgctgggccgatcgtggagcgtgccggtcatccgccacctcttcgctccgctgaaggaatattttgcttgtgtgtctagcggcaatagtaacgctaacagccgcgggccgagcttcagcagcggcctggtgccgttaagcttgcgcggcagccatatgttcgaaaccgtgcctgtgtggaggagacagccagtccgggtgctgtccctttttgaagacatcaagaaagagctgacgagtttgggctttttggaaagtggttctgacccgggacaactgaagcatgtggttgatgtcacagacacagtgaggaaggatgtggaggagtggggacccttcgatcttgtgtacggcgccacacctcccctgggccacacctgtgaccgtcctcccagctggtacctgttccagttccaccggctcctgcagtacgcacggcccaagccaggcagccccaggcccttcttctggatgttcgtggacaatctggtgctgaacaaggaagacctggacgtcgcatctcgcttcctggagatggagccagtcaccatcccagatgtccacggcggatccttgcagaatgctgtccgcgtgtggagcaacatcccagccataaggagcagcaggcactgggctctggtttcggaagaagaattgtccctgctggcccagaacaagcagagctcgaagctcgcggccaagtggcccaccaagctggtgaagaactgctttctccccctaagagaatatttcaagtatttttcaggagggccgagctctggcagcgagctgattaaggagaacatgcacatgaagctgtacatggagggcaccgtggacaaccatcacttcaagtgcacatccgagggcgaaggcaagccctacgagggcacccagaccatgagaatcaaggtggtcgagggcggccctctccccttcgccttcgacatcctggctactagcttcctctacggcagcaagaccttcatcaaccacacccagggcatccccgacttcttcaagcagtccttccctgagggcttcacatgggagagagtcaccacatacgaagacgggggcgtgctgaccgctacccaggacaccagcctccaggacggctgcctcatctacaacgtcaagatcagaggggtgaacttcacatccaacggccctgtgatgcagaagaaaacactcggctgggaggccttcaccgaaacgctgtaccccgctgacggcggcctggaaggcagaaacgacatggccctgaagctcgtgggcgggagccatctgatcgcaaacatcaagaccacatatagatccaagaaacccgctaagaacctcaagatgcctggcgtctactatgtggactacagactggaaagaatcaaggaggccaacaacgagacctacgtcgagcagcacgaggtggcagtggccagatactgcgacctccctagcaaactggggcacaagcttaatgcacccccaccaagtggagggtctcctgccgggtccccaacatctactgaagaaggcaccagcgaatccgcaacgcccgagtcaggccctggtacctccacagaaccatctgaaggtagtgcgcctggttccccagctggaagccctacttccaccgaagaaggcacgtcaaccgaaccaagtgaaggatctgcccctgggaccagcactgaaccatctgagatgaacaattcccagggaagagtgaccttcgaggacgtgaccgtgaacttcacccaaggcgagtggcagagactgaaccccgagcagagaaacctgtaccgggacgtgatgctggaaaactacagcaacctggtgtccgtcggccagggcgagacaacaaagcctgacgtgatcctgcggctggaacagggcaaagagccttggctggaagaggaagaggtgctcggatctggcagagccgagaagaatggcgatatcggcggacagatctggaagccaaaggatgtgaaagagagtctcagcggcagcgagacccccggtaccagcgagggcggccctggcacctccacagaaccatctgaaggtagtgcgcctggttccccagctggaagccctacttccaccgaagaaggcacgtcaaccgaaccaagtgaaggatctgcccctgggaccagcactgaaccatctgagccaaaaaagaagagaaaggtaatggacaagaagtacagcatcggcctggccatcggcaccaactctgtgggctgggccgtgatcaccgacgagtacaaggtgcccagcaagaaattcaaggtgctgggcaacaccgaccggcacagcatcaagaagaacctgatcggcgccctgctgttcgacagcggagaaacagccgaggccacccggctgaagagaaccgccagaagaagatacaccagacggaagaaccggatctgctatctgcaagagatcttcagcaacgagatggccaaggtggacgacagcttcttccacagactggaagagtccttcctggtggaagaggataagaagcacgagcggcaccccatcttcggcaacatcgtggacgaggtggcctaccacgagaagtaccccaccatctaccacctgagaaagaaactggtggacagcaccgacaaggccgacctgcggctgatctatctggccctggcccacatgatcaagttccggggccacttcctgatcgagggcgacctgaaccccgacaacagcgacgtggacaagctgttcatccagctggtgcagacctacaaccagctgttcgaggaaaaccccatcaacgccagcggcgtggacgccaaggccatcctgtctgccagactgagcaagagcagacggctggaaaatctgatcgcccagctgcccggcgagaagaagaatggcctgttcggcaacctgattgccctgagcctgggcctgacccccaacttcaagagcaacttcgacctggccgaggatgccaaactgcagctgagcaaggacacctacgacgacgacctggacaacctgctggcccagatcggcgaccagtacgccgacctgtttctggccgccaagaacctgtccgacgccatcctgctgagcgacatcctgagagtgaacaccgagatcaccaaggcccccctgagcgcctctatgatcaagagatacgacgagcaccaccaggacctgaccctgctgaaagctctcgtgcggcagcagctgcctgagaagtacaaagagattttcttcgaccagagcaagaacggctacgccggctacatcgatggcggagccagccaggaagagttctacaagttcatcaagcccatcctggaaaagatggacggcaccgaggaactgctcgtgaagctgaacagagaggacctgctgcggaagcagcggaccttcgacaacggcagcatcccccaccagatccacctgggagagctgcacgccattctgcggcggcaggaagatttttacccattcctgaaggacaaccgggaaaagatcgagaagatcctgaccttccgcatcccctactacgtgggccctctggccaggggaaacagcagattcgcctggatgaccagaaagagcgaggaaaccatcaccccctggaacttcgaggaagtggtggacaagggcgccagcgcccagagcttcatcgagcggatgaccaacttcgataagaacctgcccaacgagaaggtgctgcccaagcacagcctgctgtacgagtacttcaccgtgtacaacgagctgaccaaagtgaaatacgtgaccgagggaatgagaaagcccgccttcctgagcggcgagcagaaaaaagccatcgtggacctgctgttcaagaccaaccggaaagtgaccgtgaagcagctgaaagaggactacttcaagaaaatcgagtgcttcgactccgtggaaatctccggcgtggaagatcggttcaacgcctccctgggcacataccacgatctgctgaaaattatcaaggacaaggacttcctggacaatgaggaaaacgaggacattctggaagatatcgtgctgaccctgacactgtttgaggacagagagatgatcgaggaacggctgaaaacctatgcccacctgttcgacgacaaagtgatgaagcagctgaagcggcggagatacaccggctggggcaggctgagccggaagctgatcaacggcatccgggacaagcagtccggcaagacaatcctggatttcctgaagtccgacggcttcgccaacagaaacttcatgcagctgatccacgacgacagcctgacctttaaagaggacatccagaaagcccaggtgtccggccagggcgatagcctgcacgagcacattgccaatctggccggcagccccgccattaagaagggcatcctgcagacagtgaaggtggtggacgagctcgtgaaagtgatgggccggcacaagcccgagaacatcgtgatcgaaatggccagagagaaccagaccacccagaagggacagaagaacagccgcgagagaatgaagcggatcgaagagggcatcaaagagctgggcagccagatcctgaaagaacaccccgtggaaaacacccagctgcagaacgagaagctgtacctgtactacctgcagaatgggcgggatatgtacgtggaccaggaactggacatcaaccggctgtccgactacgatgtggacgctatcgtgcctcagagctttctgaaggacgactccatcgataacaaagtgctgactcggagcgacaagaaccggggcaagagcgacaacgtgccctccgaagaggtcgtgaagaagatgaagaactactggcgccagctgctgaatgccaagctgattacccagaggaagttcgacaatctgaccaaggccgagagaggcggcctgagcgaactggataaggccggcttcatcaagagacagctggtggaaacccggcagatcacaaagcacgtggcacagatcctggactcccggatgaacactaagtacgacgagaacgacaaactgatccgggaagtgaaagtgatcaccctgaagtccaagctggtgtccgatttccggaaggatttccagttttacaaagtgcgcgagatcaacaactaccaccacgcccacgacgcctacctgaacgccgtcgtgggaaccgccctgatcaaaaagtaccctaagctggaaagcgagttcgtgtacggcgactacaaggtgtacgacgtgcggaagatgatcgccaagagcgagcaggaaatcggcaaggctaccgccaagtacttcttctacagcaacatcatgaactttttcaagaccgagattaccctggccaacggcgagatccggaagcggcctctgatcgagacaaacggcgaaacaggcgagatcgtgtgggataagggccgggactttgccaccgtgcggaaagtgctgtctatgccccaagtgaatatcgtgaaaaagaccgaggtgcagacaggcggcttcagcaaagagtctatcctgcccaagaggaacagcgacaagctgatcgccagaaagaaggactgggaccctaagaagtacggcggcttcgacagccccaccgtggcctattctgtgctggtggtggccaaagtggaaaagggcaagtccaagaaactgaagagtgtgaaagagctgctggggatcaccatcatggaaagaagcagcttcgagaagaatcccatcgactttctggaagccaagggctacaaagaagtgaaaaaggacctgatcatcaagctgcctaagtactccctgttcgagctggaaaacggccggaagagaatgctggcctctgccggcgaactgcagaagggaaacgaactggccctgccctccaaatatgtgaacttcctgtacctggccagccactatgagaagctgaagggctcccccgaggataatgagcagaaacagctgtttgtggaacagcacaaacactacctggacgagatcatcgagcagatcagcgagttctccaagagagtgatcctggccgacgctaatctggacaaggtgctgagcgcctacaacaagcacagagacaagcctatcagagagcaggccgagaatatcatccacctgtttaccctgaccaatctgggagcccctgccgccttcaagtactttgacaccaccatcgaccggaagaggtacaccagcaccaaagaggtgctggacgccaccctgatccaccagagcatcaccggcctgtacgagacacggatcgacctgtctcagctgggaggcgacgcctatccctatgacgtgcccgattatgccagcctgggcagcggctcccccaagaaaaaacgcaaggtggaagatcctaagaaaaagcggaaagtggacggcctcgaggctactaacttcagcctgctgaagcaggctggagacgtggaggagaaccctggacctatgcattaatgagatcccaagcacgcagcaatgcagctcaaaacgcttagcctagccacacccccacgggaaacagcagtgattaacctttagcaataaacgaaagtttaactaagctatactaaccccagggttggtcaatttcgtgccagccacaccctggtactgcatgcacgcaatgctagctgcccctttcccgtcctgggcaccccgagtctcccccgaccccgggtcccaggtatgctcccacctccacctgccccactcaccacctctgctagttccagacacctccgagacgaggaaaaaaaaaaaaaaaaaaaaaaaaaaaaaaaaaaaaaaaaaaaaaaaaaaaaaaaaaaaaaaaaaaaaaaaaaaaaaaaaaaaaaaaaaaaaaaaaaaaaaaaaaaaaaaaaaaaaaaaaaaaaaaaaaaaaaaaaaaaaaaaaaaaaaaaaaaaaaaaaaaaaaaaaaaaaaaaaaaaaaaaaaaaaaaaaaaaaaaaaaaaaaaaaaaaaaaaaaaaaaaaaaaaaaaaaaaaaaaaaaaaaaaaaaaaaaaaaaaaaaaaaaaaaaaaaaaaaaaaaaaaaaaaaaaaaaaaaaaaaaaaaaaaaaaaaaaaaaaaaaaaaaaaaaaaaaaaaaaaaaaaaaaaaaaaaaaaaaaaaaaaaaaaaaaaaaaaaaaaaaaaaaaaaaaaaaaccgtcttcaagctttctagaaattcactggccgtcgttttacaacgtcgtgactgggaaaaccctggcgttacccaacttaatcgccttgcagcacatccccctttcgccagctggcgtaatagcgaagaggcccgcaccgatcgcccttcccaacagttgcgcagcctgaatggcgaatggcgcctgatgcggtattttctccttacgcatctgtgcggtatttcacaccgcatatggtgcactctcagtacaatctgctctgatgccgcatagttaagccagccccgacacccgccaacacccgctgacgcgccctgacgggcttgtctgctcccggcatccgcttacagacaagctgtgaccgtctccgggagctgcatgtgtcagaggttttcaccgtcatcaccgaaacgcgcgagacgaaagggcctcgtgatacgcctatttttataggttaatgtcatgataataatggtttcttagacgtcaggtggcacttttcggggaaatgtgcgcggaacccctatttgtttatttttctaaatacattcaaatatgtatccgctcatgagacaataaccctgataaatgcttcaataatattgaaaaaggaagagtatgagtattcaacatttccgtgtcgcccttattcccttttttgcggcattttgccttcctgtttttgctcacccagaaacgctggtgaaagtaaaagatgctgaagatcagttgggtgcacgagtgggttacatcgaactggatctcaacagcggtaagatccttgagagttttcgccccgaagaacgttttccaatgatgagcacttttaaagttctgctatgtggcgcggtattatcccgtattgacgccgggcaagagcaactcggtcgccgcatacactattctcagaatgacttggttgagtactcaccagtcacagaaaagcatcttacggatggcatgacagtaagagaattatgcagtgctgccataaccatgagtgataacactgcggccaacttacttctgacaacgatcggaggaccgaaggagctaaccgcttttttgcacaacatgggggatcatgtaactcgccttgatcgttgggaaccggagctgaatgaagccataccaaacgacgagcgtgacaccacgatgcctgtagcaatggcaacaacgttgcgcaaactattaactggcgaactacttactctagcttcccggcaacaattaatagactggatggaggcggataaagttgcaggaccacttctgcgctcggcccttccggctggctggtttattgctgataaatctggagccggtgagcgtgggtctcgcggtatcattgcagcactggggccagatggtaagccctcccgtatcgtagttatctacacgacggggagtcaggcaactatggatgaacgaaatagacagatcgctgagataggtgcctcactgattaagcattggtaactgtcagaccaagtttactcatatatactttagattgatttaaaacttcatttttaatttaaaaggatctaggtgaagatcctttttgataatctcatgaccaaaatcccttaacgtgagttttcgttccactgagcgt

SEQ ID NO: 161 - DNA, 10374 bp, synthetic construct
  misc_feature 1..10374: note = V43 DNA
  source 1..10374: mol_type = other DNA
cagaccccgtagaaaagatcaaaggatcttcttgagatcctttttttctgcgcgtaatctgctgcttgcaaacaaaaaaaccaccgctaccagcggtggtttgtttgccggatcaagagctaccaactctttttccgaaggtaactggcttcagcagagcgcagataccaaatactgttcttctagtgtagccgtagttaggccaccacttcaagaactctgtagcaccgcctacatacctcgctctgctaatcctgttaccagtggctgctgccagtggcgataagtcgtgtcttaccgggttggactcaagacgatagttaccggataaggcgcagcggtcgggctgaacggggggttcgtgcacacagcccagcttggagcgaacgacctacaccgaactgagatacctacagcgtgagctatgagaaagcgccacgcttcccgaagggagaaaggcggacaggtatccggtaagcggcagggtcggaacaggagagcgcacgagggagcttccagggggaaacgcctggtatctttatagtcctgtcgggtttcgccacctctgacttgagcgtcgatttttgtgatgctcgtcaggggggcggagcctatggaaaaacgccagcaacgcggcctttttacggttcctggccttttgctggccttttgctcacatgttctttcctgcgttatcccctgattctgtggataaccgtattaccgcctttgagtgagctgataccgctcgccgcagccgaacgaccgagcgcagcgagtcagtgagcgaggaagcggaagagcgcccaatacgcaaaccgcctctccccgcgcgttggccgattcattaatgcagctggcacgacaggtttcccgactggaaagcgggcagtgagcgcaacgcaattaatgtgagttagctcactcattaggcaccccaggctttacactttatgcttccggctcgtatgttgtgtggaattgtgagcggataacaatttcacacaggaaacagctatgaccatgattacgcctctagaaagctttaatacgactcactataaggactcactatttgttttcgcgcccagttgcaaaaagtgtcgacatttgcttctgacacaactgtgttcactagcaacctcaaacagacaccgccaccatgcctgctgctaagagagtgaaactggatggatccaaccatgaccaggaatttgaccccccaaaggtttacccacctgtgccagctgagaagaggaagcccatccgcgtgctgtctctctttgatgggattgctacagggctcctggtgctgaaggacctgggcatccaagtggaccgctacattgcctccgaggtgtgtgaggactccatcacggtgggcatggtgcggcaccagggaaagatcatgtacgtcggggacgtccgcagcgtcacacagaagcatatccaggagtggggcccattcgacctggtgattggaggcagtccctgcaatgacctctccattgtcaaccctgcccgcaagggactttatgagggtactggccgcctcttctttgagttctaccgcctcctgcatgatgcgcggcccaaggagggagatgatcgccccttcttctggctctttgagaatgtggtggccatgggcgttagtgacaagagggacatctcgcgatttcttgagtctaaccccgtgatgattgacgccaaagaagtgtctgctgcacacagggcccgttacttctggggtaaccttcctggcatgaacaggcctttggcatccactgtgaatgataagctggagctgcaagagtgtctggagcacggcagaatagccaagttcagcaaagtgaggaccattaccaccaggtcaaactctataaagcagggcaaagaccagcatttccccgtcttcatgaacgagaaggaggacatcctgtggtgcactgaaatggaaagggtgtttggcttccccgtccactacacagacgtctccaacatgagccgcttggcgaggcagagactgctgggccgatcgtggagcgtgccggtcatccgccacctcttcgctccgctgaaggaatattttgcttgtgtgtctagcggcaatagtaacgctaacagccgcgggccgagcttcagcagcggcctggtgccgttaagcttgcgcggcagccatatgttcgaaaccgtgcctgtgtggaggagacagccagtccgggtgctgtccctttttgaagacatcaagaaagagctgacgagtttgggctttttggaaagtggttctgacccgggacaactgaagcatgtggttgatgtcacagacacagtgaggaaggatgtggaggagtggggacccttcgatcttgtgtacggcgccacacctcccctgggccacacctgtgaccgtcctcccagctggtacctgttccagttccaccggctcctgcagtacgcacggcccaagccaggcagccccaggcccttcttctggatgttcgtggacaatctggtgctgaacaaggaagacctggacgtcgcatctcgcttcctggagatggagccagtcaccatcccagatgtccacggcggatccttgcagaatgctgtccgcgtgtggagcaacatcccagccataaggagcagcaggcactgggctctggtttcggaagaagaattgtccctgctggcccagaacaagcagagctcgaagctcgcggccaagtggcccaccaagctggtgaagaactgctttctccccctaagagaatatttcaagtatttttcaggagggccgagctctggcagcgagctgattaaggagaacggcctggaaggcagaaacgacatggccctgaagctcgtgggcgggagccatctgatcgcaaacatcaagaccacatatagatccaagaaacccgctaagaacctcaagatgcctggcgtctactatgtggactacagactggaaagaatcaaggaggccaacaacgagacctacgtcgagcagcacgaggtggcagtggccagatactgcgacctccctagcaaactggggcacaagcttaatgcacccccaccaagtggagggtctcctgccgggtccccaacatctactgaagaaggcaccagcgaatccgcaacgcccgagtcaggccctggtacctccacagaaccatctgaaggtagtgcgcctggttccccagctggaagccctacttccaccgaagaaggcacgtcaaccgaaccaagtgaaggatctgcccctgggaccagcactgaaccatctgagatgaacaattcccagggaagagtgaccttcgaggacgtgaccgtgaacttcacccaaggcgagtggcagagactgaaccccgagcagagaaacctgtaccgggacgtgatgctggaaaactacagcaacctggtgtccgtcggccagggcgagacaacaaagcctgacgtgatcctgcggctggaacagggcaaagagccttggctggaagaggaagaggtgctcggatctggcagagccgagaagaatggcgatatcggcggacagatctggaagccaaaggatgtgaaagagagtctcagcggcagcgagacccccggtaccagcgagggcggccctggcacctccacagaaccatctgaaggtagtgcgcctggttccccagctggaagccctacttccaccgaagaaggcacgtcaaccgaaccaagtgaaggatctgcccctgggaccagcactgaaccatctgagccaaaaaagaagagaaaggtaatggacaagaagtacagcatcggcctggccatcggcaccaactctgtgggctgggccgtgatcaccgacgagtacaaggtgcccagcaagaaattcaaggtgctgggcaacaccgaccggcacagcatcaagaagaacctgatcggcgccctgctgttcgacagcggagaaacagccgaggccacccggctgaagagaaccgccagaagaagatacaccagacggaagaaccggatctgctatctgcaagagatcttcagcaacgagatggccaaggtggacgacagcttcttccacagactggaagagtccttcctggtggaagaggataagaagcacgagcggcaccccatcttcggcaacatcgtggacgaggtggcctaccacgagaagtaccccaccatctaccacctgagaaagaaactggtggacagcaccgacaaggccgacctgcggctgatctatctggccctggcccacatgatcaagttccggggccacttcctgatcgagggcgacctgaaccccgacaacagcgacgtggacaagctgttcatccagctggtgcagacctacaaccagctgttcgaggaaaaccccatcaacgccagcggcgtggacgccaaggccatcctgtctgccagactgagcaagagcagacggctggaaaatctgatcgcccagctgcccggcgagaagaagaatggcctgttcggcaacctgattgccctgagcctgggcctgacccccaacttcaagagcaacttcgacctggccgaggatgccaaactgcagctgagcaaggacacctacgacgacgacctggacaacctgctggcccagatcggcgaccagtacgccgacctgtttctggccgccaagaacctgtccgacgccatcctgctgagcgacatcctgagagtgaacaccgagatcaccaaggcccccctgagcgcctctatgatcaagagatacgacgagcaccaccaggacctgaccctgctgaaagctctcgtgcggcagcagctgcctgagaagtacaaagagattttcttcgaccagagcaagaacggctacgccggctacatcgatggcggagccagccaggaagagttctacaagttcatcaagcccatcctggaaaagatggacggcaccgaggaactgctcgtgaagctgaacagagaggacctgctgcggaagcagcggaccttcgacaacggcagcatcccccaccagatccacctgggagagctgcacgccattctgcggcggcaggaagatttttacccattcctgaaggacaaccgggaaaagatcgagaagatcctgaccttccgcatcccctactacgtgggccctctggccaggggaaacagcagattcgcctggatgaccagaaagagcgaggaaaccatcaccccctggaacttcgaggaagtggtggacaagggcgccagcgcccagagcttcatcgagcggatgaccaacttcgataagaacctgcccaacgagaaggtgctgcccaagcacagcctgctgtacgagtacttcaccgtgtacaacgagctgaccaaagtgaaatacgtgaccgagggaatgagaaagcccgccttcctgagcggcgagcagaaaaaagccatcgtggacctgctgttcaagaccaaccggaaagtgaccgtgaagcagctgaaagaggactacttcaagaaaatcgagtgcttcgactccgtggaaatctccggcgtggaagatcggttcaacgcctccctgggcacataccacgatctgctgaaaattatcaaggacaaggacttcctggacaatgaggaaaacgaggacattctggaagatatcgtgctgaccctgacactgtttgaggacagagagatgatcgaggaacggctgaaaacctatgcccacctgttcgacgacaaagtgatgaagcagctgaagcggcggagatacaccggctggggcaggctgagccggaagctgatcaacggcatccgggacaagcagtccggcaagacaatcctggatttcctgaagtccgacggcttcgccaacagaaacttcatgcagctgatccacgacgacagcctgacctttaaagaggacatccagaaagcccaggtgtccggccagggcgatagcctgcacgagcacattgccaatctggccggcagccccgccattaagaagggcatcctgcagacagtgaaggtggtggacgagctcgtgaaagtgatgggccggcacaagcccgagaacatcgtgatcgaaatggccagagagaaccagaccacccagaagggacagaagaacagccgcgagagaatgaagcggatcgaagagggcatcaaagagctgggcagccagatcctgaaagaacaccccgtggaaaacacccagctgcagaacgagaagctgtacctgtactacctgcagaatgggcgggatatgtacgtggaccaggaactggacatcaaccggctgtccgactacgatgtggacgctatcgtgcctcagagctttctgaaggacgactccatcgataacaaagtgctgactcggagcgacaagaaccggggcaagagcgacaacgtgccctccgaagaggtcgtgaagaagatgaagaactactggcgccagctgctgaatgccaagctgattacccagaggaagttcgacaatctgaccaaggccgagagaggcggcctgagcgaactggataaggccggcttcatcaagagacagctggtggaaacccggcagatcacaaagcacgtggcacagatcctggactcccggatgaacactaagtacgacgagaacgacaaactgatccgggaagtgaaagtgatcaccctgaagtccaagctggtgtccgatttccggaaggatttccagttttacaaagtgcgcgagatcaacaactaccaccacgcccacgacgcctacctgaacgccgtcgtgggaaccgccctgatcaaaaagtaccctaagctggaaagcgagttcgtgtacggcgactacaaggtgtacgacgtgcggaagatgatcgccaagagcgagcaggaaatcggcaaggctaccgccaagtacttcttctacagcaacatcatgaactttttcaagaccgagattaccctggccaacggcgagatccggaagcggcctctgatcgagacaaacggcgaaacaggcgagatcgtgtgggataagggccgggactttgccaccgtgcggaaagtgctgtctatgccccaagtgaatatcgtgaaaaagaccgaggtgcagacaggcggcttcagcaaagagtctatcctgcccaagaggaacagcgacaagctgatcgccagaaagaaggactgggaccctaagaagtacggcggcttcgacagccccaccgtggcctattctgtgctggtggtggccaaagtggaaaagggcaagtccaagaaactgaagagtgtgaaagagctgctggggatcaccatcatggaaagaagcagcttcgagaagaatcccatcgactttctggaagccaagggctacaaagaagtgaaaaaggacctgatcatcaagctgcctaagtactccctgttcgagctggaaaacggccggaagagaatgctggcctctgccggcgaactgcagaagggaaacgaactggccctgccctccaaatatgtgaacttcctgtacctggccagccactatgagaagctgaagggctcccccgaggataatgagcagaaacagctgtttgtggaacagcacaaacactacctggacgagatcatcgagcagatcagcgagttctccaagagagtgatcctggccgacgctaatctggacaaggtgctgagcgcctacaacaagcacagagacaagcctatcagagagcaggccgagaatatcatccacctgtttaccctgaccaatctgggagcccctgccgccttcaagtactttgacaccaccatcgaccggaagaggtacaccagcaccaaagaggtgctggacgccaccctgatccaccagagcatcaccggcctgtacgagacacggatcgacctgtctcagctgggaggcgacgcctatccctatgacgtgcccgattatgccagcctgggcagcggctcccccaagaaaaaacgcaaggtggaagatcctaagaaaaagcggaaagtggacggcctcgaggctactaacttcagcctgctgaagcaggctggagacgtggaggagaaccctggacctatgcattaatgagatcccaagcacgcagcaatgcagctcaaaacgcttagcctagccacacccccacgggaaacagcagtgattaacctttagcaataaacgaaagtttaactaagctatactaaccccagggttggtcaatttcgtgccagccacaccctggtactgcatgcacgcaatgctagctgcccctttcccgtcctgggcaccccgagtctcccccgaccccgggtcccaggtatgctcccacctccacctgccccactcaccacctctgctagttccagacacctccgagacgaggaaaaaaaaaaaaaaaaaaaaaaaaaaaaaaaaaaaaaaaaaaaaaaaaaaaaaaaaaaaaaaaaaaaaaaaaaaaaaaaaaaaaaaaaaaaaaaaaaaaaaaaaaaaaaaaaaaaaaaaaaaaaaaaaaaaaaaaaaaaaaaaaaaaaaaaaaaaaaaaaaaaaaaaaaaaaaaaaaaaaaaaaaaaaaaaaaaaaaaaaaaaaaaaaaaaaaaaaaaaaaaaaaaaaaaaaaaaaaaaaaaaaaaaaaaaaaaaaaaaaaaaaaaaaaaaaaaaaaaaaaaaaaaaaaaaaaaaaaaaaaaaaaaaaaaaaaaaaaaaaaaaaaaaaaaaaaaaaaaaaaaaaaaaaaaaaaaaaaaaaaaaaaaaaaaaaaaaaaaaaaaaaaaaaaaaaaaccgtcttcaagctttctagaaattcactggccgtcgttttacaacgtcgtgactgggaaaaccctggcgttacccaacttaatcgccttgcagcacatccccctttcgccagctggcgtaatagcgaagaggcccgcaccgatcgcccttcccaacagttgcgcagcctgaatggcgaatggcgcctgatgcggtattttctccttacgcatctgtgcggtatttcacaccgcatatggtgcactctcagtacaatctgctctgatgccgcatagttaagccagccccgacacccgccaacacccgctgacgcgccctgacgggcttgtctgctcccggcatccgcttacagacaagctgtgaccgtctccgggagctgcatgtgtcagaggttttcaccgtcatcaccgaaacgcgcgagacgaaagggcctcgtgatacgcctatttttataggttaatgtcatgataataatggtttcttagacgtcaggtggcacttttcggggaaatgtgcgcggaacccctatttgtttatttttctaaatacattcaaatatgtatccgctcatgagacaataaccctgataaatgcttcaataatattgaaaaaggaagagtatgagtattcaacatttccgtgtcgcccttattcccttttttgcggcattttgccttcctgtttttgctcacccagaaacgctggtgaaagtaaaagatgctgaagatcagttgggtgcacgagtgggttacatcgaactggatctcaacagcggtaagatccttgagagttttcgccccgaagaacgttttccaatgatgagcacttttaaagttctgctatgtggcgcggtattatcccgtattgacgccgggcaagagcaactcggtcgccgcatacactattctcagaatgacttggttgagtactcaccagtcacagaaaagcatcttacggatggcatgacagtaagagaattatgcagtgctgccataaccatgagtgataacactgcggccaacttacttctgacaacgatcggaggaccgaaggagctaaccgcttttttgcacaacatgggggatcatgtaactcgccttgatcgttgggaaccggagctgaatgaagccataccaaacgacgagcgtgacaccacgatgcctgtagcaatggcaacaacgttgcgcaaactattaactggcgaactacttactctagcttcccggcaacaattaatagactggatggaggcggataaagttgcaggaccacttctgcgctcggcccttccggctggctggtttattgctgataaatctggagccggtgagcgtgggtctcgcggtatcattgcagcactggggccagatggtaagccctcccgtatcgtagttatctacacgacggggagtcaggcaactatggatgaacgaaatagacagatcgctgagataggtgcctcactgattaagcattggtaactgtcagaccaagtttactcatatatactttagattgatttaaaacttcatttttaatttaaaaggatctaggtgaagatcctttttgataatctcatgaccaaaatcccttaacgtgagttttcgttccactgagcgt

SEQ ID NO: 162 - DNA, 10254 bp, synthetic construct
  misc_feature 1..10254: note = V44 DNA
  source 1..10254: mol_type = other DNA
cagaccccgtagaaaagatcaaaggatcttcttgagatcctttttttctgcgcgtaatctgctgcttgcaaacaaaaaaaccaccgctaccagcggtggtttgtttgccggatcaagagctaccaactctttttccgaaggtaactggcttcagcagagcgcagataccaaatactgttcttctagtgtagccgtagttaggccaccacttcaagaactctgtagcaccgcctacatacctcgctctgctaatcctgttaccagtggctgctgccagtggcgataagtcgtgtcttaccgggttggactcaagacgatagttaccggataaggcgcagcggtcgggctgaacggggggttcgtgcacacagcccagcttggagcgaacgacctacaccgaactgagatacctacagcgtgagctatgagaaagcgccacgcttcccgaagggagaaaggcggacaggtatccggtaagcggcagggtcggaacaggagagcgcacgagggagcttccagggggaaacgcctggtatctttatagtcctgtcgggtttcgccacctctgacttgagcgtcgatttttgtgatgctcgtcaggggggcggagcctatggaaaaacgccagcaacgcggcctttttacggttcctggccttttgctggccttttgctcacatgttctttcctgcgttatcccctgattctgtggataaccgtattaccgcctttgagtgagctgataccgctcgccgcagccgaacgaccgagcgcagcgagtcagtgagcgaggaagcggaagagcgcccaatacgcaaaccgcctctccccgcgcgttggccgattcattaatgcagctggcacgacaggtttcccgactggaaagcgggcagtgagcgcaacgcaattaatgtgagttagctcactcattaggcaccccaggctttacactttatgcttccggctcgtatgttgtgtggaattgtgagcggataacaatttcacacaggaaacagctatgaccatgattacgcctctagaaagctttaatacgactcactataaggactcactatttgttttcgcgcccagttgcaaaaagtgtcgacatttgcttctgacacaactgtgttcactagcaacctcaaacagacaccgccaccatgcctgctgctaagagagtgaaactggatggatccaaccatgaccaggaatttgaccccccaaaggtttacccacctgtgccagctgagaagaggaagcccatccgcgtgctgtctctctttgatgggattgctacagggctcctggtgctgaaggacctgggcatccaagtggaccgctacattgcctccgaggtgtgtgaggactccatcacggtgggcatggtgcggcaccagggaaagatcatgtacgtcggggacgtccgcagcgtcacacagaagcatatccaggagtggggcccattcgacctggtgattggaggcagtccctgcaatgacctctccattgtcaaccctgcccgcaagggactttatgagggtactggccgcctcttctttgagttctaccgcctcctgcatgatgcgcggcccaaggagggagatgatcgccccttcttctggctctttgagaatgtggtggccatgggcgttagtgacaagagggacatctcgcgatttcttgagtctaaccccgtgatgattgacgccaaagaagtgtctgctgcacacagggcccgttacttctggggtaaccttcctggcatgaacaggcctttggcatccactgtgaatgataagctggagctgcaagagtgtctggagcacggcagaatagccaagttcagcaaagtgaggaccattaccaccaggtcaaactctataaagcagggcaaagaccagcatttccccgtcttcatgaacgagaaggaggacatcctgtggtgcactgaaatggaaagggtgtttggcttccccgtccactacacagacgtctccaacatgagccgcttggcgaggcagagactgctgggccgatcgtggagcgtgccggtcatccgccacctcttcgctccgctgaaggaatattttgcttgtgtgtctagcggcaatagtaacgctaacagccgcgggccgagcttcagcagcggcctggtgccgttaagcttgcgcggcagccatatgttcgaaaccgtgcctgtgtggaggagacagccagtccgggtgctgtccctttttgaagacatcaagaaagagctgacgagtttgggctttttggaaagtggttctgacccgggacaactgaagcatgtggttgatgtcacagacacagtgaggaaggatgtggaggagtggggacccttcgatcttgtgtacggcgccacacctcccctgggccacacctgtgaccgtcctcccagctggtacctgttccagttccaccggctcctgcagtacgcacggcccaagccaggcagccccaggcccttcttctggatgttcgtggacaatctggtgctgaacaaggaagacctggacgtcgcatctcgcttcctggagatggagccagtcaccatcccagatgtccacggcggatccttgcagaatgctgtccgcgtgtggagcaacatcccagccataaggagcagcaggcactgggctctggtttcggaagaagaattgtccctgctggcccagaacaagcagagctcgaagctcgcggccaagtggcccaccaagctggtgaagaactgctttctccccctaagagaatatttcaagtatttttcaggagggccgagctctggcagcgagctgattaaggagaactactatgtggactacagactggaaagaatcaaggaggccaacaacgagacctacgtcgagcagcacgaggtggcagtggccagatactgcgacctccctagcaaactggggcacaagcttaatgcacccccaccaagtggagggtctcctgccgggtccccaacatctactgaagaaggcaccagcgaatccgcaacgcccgagtcaggccctggtacctccacagaaccatctgaaggtagtgcgcctggttccccagctggaagccctacttccaccgaagaaggcacgtcaaccgaaccaagtgaaggatctgcccctgggaccagcactgaaccatctgagatgaacaattcccagggaagagtgaccttcgaggacgtgaccgtgaacttcacccaaggcgagtggcagagactgaaccccgagcagagaaacctgtaccgggacgtgatgctggaaaactacagcaacctggtgtccgtcggccagggcgagacaacaaagcctgacgtgatcctgcggctggaacagggcaaagagccttggctggaagaggaagaggtgctcggatctggcagagccgagaagaatggcgatatcggcggacagatctggaagccaaaggatgtgaaagagagtctcagcggcagcgagacccccggtaccagcgagggcggccctggcacctccacagaaccatctgaaggtagtgcgcctggttccccagctggaagccctacttccaccgaagaaggcacgtcaaccgaaccaagtgaaggatctgcccctgggaccagcactgaaccatctgagccaaaaaagaagagaaaggtaatggacaagaagtacagcatcggcctggccatcggcaccaactctgtgggctgggccgtgatcaccgacgagtacaaggtgcccagcaagaaattcaaggtgctgggcaacaccgaccggcacagcatcaagaagaacctgatcggcgccctgctgttcgacagcggagaaacagccgaggccacccggctgaagagaaccgccagaagaagatacaccagacggaagaaccggatctgctatctgcaagagatcttcagcaacgagatggccaaggtggacgacagcttcttccacagactggaagagtccttcctggtggaagaggataagaagcacgagcggcaccccatcttcggcaacatcgtggacgaggtggcctaccacgagaagtaccccaccatctaccacctgagaaagaaactggtggacagcaccgacaaggccgacctgcggctgatctatctggccctggcccacatgatcaagttccggggccacttcctgatcgagggcgacctgaaccccgacaacagcgacgtggacaagctgttcatccagctggtgcagacctacaaccagctgttcgaggaaaaccccatcaacgccagcggcgtggacgccaaggccatcctgtctgccagactgagcaagagcagacggctggaaaatctgatcgcccagctgcccggcgagaagaagaatggcctgttcggcaacctgattgccctgagcctgggcctgacccccaacttcaagagcaacttcgacctggccgaggatgccaaactgcagctgagcaaggacacctacgacgacgacctggacaacctgctggcccagatcggcgaccagtacgccgacctgtttctggccgccaagaacctgtccgacgccatcctgctgagcgacatcctgagagtgaacaccgagatcaccaaggcccccctgagcgcctctatgatcaagagatacgacgagcaccaccaggacctgaccctgctgaaagctctcgtgcggcagcagctgcctgagaagtacaaagagattttcttcgaccagagcaagaacggctacgccggctacatcgatggcggagccagccaggaagagttctacaagttcatcaagcccatcctggaaaagatggacggcaccgaggaactgctcgtgaagctgaacagagaggacctgctgcggaagcagcggaccttcgacaacggcagcatcccccaccagatccacctgggagagctgcacgccattctgcggcggcaggaagatttttacccattcctgaaggacaaccgggaaaagatcgagaagatcctgaccttccgcatcccctactacgtgggccctctggccaggggaaacagcagattcgcctggatgaccagaaagagcgaggaaaccatcaccccctggaacttcgaggaagtggtggacaagggcgccagcgcccagagcttcatcgagcggatgaccaacttcgataagaacctgcccaacgagaaggtgctgcccaagcacagcctgctgtacgagtacttcaccgtgtacaacgagctgaccaaagtgaaatacgtgaccgagggaatgagaaagcccgccttcctgagcggcgagcagaaaaaagccatcgtggacctgctgttcaagaccaaccggaaagtgaccgtgaagcagctgaaagaggactacttcaagaaaatcgagtgcttcgactccgtggaaatctccggcgtggaagatcggttcaacgcctccctgggcacataccacgatctgctgaaaattatcaaggacaaggacttcctggacaatgaggaaaacgaggacattctggaagatatcgtgctgaccctgacactgtttgaggacagagagatgatcgaggaacggctgaaaacctatgcccacctgttcgacgacaaagtgatgaagcagctgaagcggcggagatacaccggctggggcaggctgagccggaagctgatcaacggcatccgggacaagcagtccggcaagacaatcctggatttcctgaagtccgacggcttcgccaacagaaacttcatgcagctgatccacgacgacagcctgacctttaaagaggacatccagaaagcccaggtgtccggccagggcgatagcctgcacgagcacattgccaatctggccggcagccccgccattaagaagggcatcctgcagacagtgaaggtggtggacgagctcgtgaaagtgatgggccggcacaagcccgagaacatcgtgatcgaaatggccagagagaaccagaccacccagaagggacagaagaacagccgcgagagaatgaagcggatcgaagagggcatcaaagagctgggcagccagatcctgaaagaacaccccgtggaaaacacccagctgcagaacgagaagctgtacctgtactacctgcagaatgggcgggatatgtacgtggaccaggaactggacatcaaccggctgtccgactacgatgtggacgctatcgtgcctcagagctttctgaaggacgactccatcgataacaaagtgctgactcggagcgacaagaaccggggcaagagcgacaacgtgccctccgaagaggtcgtgaagaagatgaagaactactggcgccagctgctgaatgccaagctgattacccagaggaagttcgacaatctgaccaaggccgagagaggcggcctgagcgaactggataaggccggcttcatcaagagacagctggtggaaacccggcagatcacaaagcacgtggcacagatcctggactcccggatgaacactaagtacgacgagaacgacaaactgatccgggaagtgaaagtgatcaccctgaagtccaagctggtgtccgatttccggaaggatttccagttttacaaagtgcgcgagatcaacaactaccaccacgcccacgacgcctacctgaacgccgtcgtgggaaccgccctgatcaaaaagtaccctaagctggaaagcgagttcgtgtacggcgactacaaggtgtacgacgtgcggaagatgatcgccaagagcgagcaggaaatcggcaaggctaccgccaagtacttcttctacagcaacatcatgaactttttcaagaccgagattaccctggccaacggcgagatccggaagcggcctctgatcgagacaaacggcgaaacaggcgagatcgtgtgggataagggccgggactttgccaccgtgcggaaagtgctgtctatgccccaagtgaatatcgtgaaaaagaccgaggtgcagacaggcggcttcagcaaagagtctatcctgcccaagaggaacagcgacaagctgatcgccagaaagaaggactgggaccctaagaagtacggcggcttcgacagccccaccgtggcctattctgtgctggtggtggccaaagtggaaaagggcaagtccaagaaactgaagagtgtgaaagagctgctggggatcaccatcatggaaagaagcagcttcgagaagaatcccatcgactttctggaagccaagggctacaaagaagtgaaaaaggacctgatcatcaagctgcctaagtactccctgttcgagctggaaaacggccggaagagaatgctggcctctgccggcgaactgcagaagggaaacgaactggccctgccctccaaatatgtgaacttcctgtacctggccagccactatgagaagctgaagggctcccccgaggataatgagcagaaacagctgtttgtggaacagcacaaacactacctggacgagatcatcgagcagatcagcgagttctccaagagagtgatcctggccgacgctaatctggacaaggtgctgagcgcctacaacaagcacagagacaagcctatcagagagcaggccgagaatatcatccacctgtttaccctgaccaatctgggagcccctgccgccttcaagtactttgacaccaccatcgaccggaagaggtacaccagcaccaaagaggtgctggacgccaccctgatccaccagagcatcaccggcctgtacgagacacggatcgacctgtctcagctgggaggcgacgcctatccctatgacgtgcccgattatgccagcctgggcagcggctcccccaagaaaaaacgcaaggtggaagatcctaagaaaaagcggaaagtggacggcctcgaggctactaacttcagcctgctgaagcaggctggagacgtggaggagaaccctggacctatgcattaatgagatcccaagcacgcagcaatgcagctcaaaacgcttagcctagccacacccccacgggaaacagcagtgattaacctttagcaataaacgaaagtttaactaagctatactaaccccagggttggtcaatttcgtgccagccacaccctggtactgcatgcacgcaatgctagctgcccctttcccgtcctgggcaccccgagtctcccccgaccccgggtcccaggtatgctcccacctccacctgccccactcaccacctctgctagttccagacacctccgagacgaggaaaaaaaaaaaaaaaaaaaaaaaaaaaaaaaaaaaaaaaaaaaaaaaaaaaaaaaaaaaaaaaaaaaaaaaaaaaaaaaaaaaaaaaaaaaaaaaaaaaaaaaaaaaaaaaaaaaaaaaaaaaaaaaaaaaaaaaaaaaaaaaaaaaaaaaaaaaaaaaaaaaaaaaaaaaaaaaaaaaaaaaaaaaaaaaaaaaaaaaaaaaaaaaaaaaaaaaaaaaaaaaaaaaaaaaaaaaaaaaaaaaaaaaaaaaaaaaaaaaaaaaaaaaaaaaaaaaaaaaaaaaaaaaaaaaaaaaaaaaaaaaaaaaaaaaaaaaaaaaaaaaaaaaaaaaaaaaaaaaaaaaaaaaaaaaaaaaaaaaaaaaaaaaaaaaaaaaaaaaaaaaaaaaaaaaaaaccgtcttcaagctttctagaaattcactggccgtcgttttacaacgtcgtgactgggaaaaccctggcgttacccaacttaatcgccttgcagcacatccccctttcgccagctggcgtaatagcgaagaggcccgcaccgatcgcccttcccaacagttgcgcagcctgaatggcgaatggcgcctgatgcggtattttctccttacgcatctgtgcggtatttcacaccgcatatggtgcactctcagtacaatctgctctgatgccgcatagttaagccagccccgacacccgccaacacccgctgacgcgccctgacgggcttgtctgctcccggcatccgcttacagacaagctgtgaccgtctccgggagctgcatgtgtcagaggttttcaccgtcatcaccgaaacgcgcgagacgaaagggcctcgtgatacgcctatttttataggttaatgtcatgataataatggtttcttagacgtcaggtggcacttttcggggaaatgtgcgcggaacccctatttgtttatttttctaaatacattcaaatatgtatccgctcatgagacaataaccctgataaatgcttcaataatattgaaaaaggaagagtatgagtattcaacatttccgtgtcgcccttattcccttttttgcggcattttgccttcctgtttttgctcacccagaaacgctggtgaaagtaaaagatgctgaagatcagttgggtgcacgagtgggttacatcgaactggatctcaacagcggtaagatccttgagagttttcgccccgaagaacgttttccaatgatgagcacttttaaagttctgctatgtggcgcggtattatcccgtattgacgccgggcaagagcaactcggtcgccgcatacactattctcagaatgacttggttgagtactcaccagtcacagaaaagcatcttacggatggcatgacagtaagagaattatgcagtgctgccataaccatgagtgataacactgcggccaacttacttctgacaacgatcggaggaccgaaggagctaaccgcttttttgcacaacatgggggatcatgtaactcgccttgatcgttgggaaccggagctgaatgaagccataccaaacgacgagcgtgacaccacgatgcctgtagcaatggcaacaacgttgcgcaaactattaactggcgaactacttactctagcttcccggcaacaattaatagactggatggaggcggataaagttgcaggaccacttctgcgctcggcccttccggctggctggtttattgctgataaatctggagccggtgagcgtgggtctcgcggtatcattgcagcactggggccagatggtaagccctcccgtatcgtagttatctacacgacggggagtcaggcaactatggatgaacgaaatagacagatcgctgagataggtgcctcactgattaagcattggtaactgtcagaccaagtttactcatatatactttagattgatttaaaacttcatttttaatttaaaaggatctaggtgaagatcctttttgataatctcatgaccaaaatcccttaacgtgagttttcgttccactgagcgt

SEQ ID NO: 163 - DNA, 10128 bp, synthetic construct
  misc_feature 1..10128: note = V45 DNA
  source 1..10128: mol_type = other DNA
gataatctcatgaccaaaatcccttaacgtgagttttcgttccactgagcgtcagaccccgtagaaaagatcaaaggatcttcttgagatcctttttttctgcgcgtaatctgctgcttgcaaacaaaaaaaccaccgctaccagcggtggtttgtttgccggatcaagagctaccaactctttttccgaaggtaactggcttcagcagagcgcagataccaaatactgttcttctagtgtagccgtagttaggccaccacttcaagaactctgtagcaccgcctacatacctcgctctgctaatcctgttaccagtggctgctgccagtggcgataagtcgtgtcttaccgggttggactcaagacgatagttaccggataaggcgcagcggtcgggctgaacggggggttcgtgcacacagcccagcttggagcgaacgacctacaccgaactgagatacctacagcgtgagctatgagaaagcgccacgcttcccgaagggagaaaggcggacaggtatccggtaagcggcagggtcggaacaggagagcgcacgagggagcttccagggggaaacgcctggtatctttatagtcctgtcgggtttcgccacctctgacttgagcgtcgatttttgtgatgctcgtcaggggggcggagcctatggaaaaacgccagcaacgcggcctttttacggttcctggccttttgctggccttttgctcacatgttctttcctgcgttatcccctgattctgtggataaccgtattaccgcctttgagtgagctgataccgctcgccgcagccgaacgaccgagcgcagcgagtcagtgagcgaggaagcggaagagcgcccaatacgcaaaccgcctctccccgcgcgttggccgattcattaatgcagctggcacgacaggtttcccgactggaaagcgggcagtgagcgcaacgcaattaatgtgagttagctcactcattaggcaccccaggctttacactttatgcttccggctcgtatgttgtgtggaattgtgagcggataacaatttcacacaggaaacagctatgaccatgattacgcctctagaaagctttaatacgactcactataaggactcactatttgttttcgcgcccagttgcaaaaagtgtcgacatttgcttctgacacaactgtgttcactagcaacctcaaacagacaccgccaccatgcctgctgctaagagagtgaaactggatggatccaaccatgaccaggaatttgaccccccaaaggtttacccacctgtgccagctgagaagaggaagcccatccgcgtgctgtctctctttgatgggattgctacagggctcctggtgctgaaggacctgggcatccaagtggaccgctacattgcctccgaggtgtgtgaggactccatcacggtgggcatggtgcggcaccagggaaagatcatgtacgtcggggacgtccgcagcgtcacacagaagcatatccaggagtggggcccattcgacctggtgattggaggcagtccctgcaatgacctctccattgtcaaccctgcccgcaagggactttatgagggtactggccgcctcttctttgagttctaccgcctcctgcatgatgcgcggcccaaggagggagatgatcgccccttcttctggctctttgagaatgtggtggccatgggcgttagtgacaagagggacatctcgcgatttcttgagtctaaccccgtgatgattgacgccaaagaagtgtctgctgcacacagggcccgttacttctggggtaaccttcctggcatgaacaggcctttggcatccactgtgaatgataagctggagctgcaagagtgtctggagcacggcagaatagccaagttcagcaaagtgaggaccattaccaccaggtcaaactctataaagcagggcaaagaccagcatttccccgtcttcatgaacgagaaggaggacatcctgtggtgcactgaaatggaaagggtgtttggcttccccgtccactacacagacgtctccaacatgagccgcttggcgaggcagagactgctgggccgatcgtggagcgtgccggtcatccgccacctcttcgctccgctgaaggaatattttgcttgtgtgtctagcggcaatagtaacgctaacagccgcgggccgagcttcagcagcggcctggtgccgttaagcttgcgcggcagccatatgttcgaaaccgtgcctgtgtggaggagacagccagtccgggtgctgtccctttttgaagacatcaagaaagagctgacgagtttgggctttttggaaagtggttctgacccgggacaactgaagcatgtggttgatgtcacagacacagtgaggaaggatgtggaggagtggggacccttcgatcttgtgtacggcgccacacctcccctgggccacacctgtgaccgtcctcccagctggtacctgttccagttccaccggctcctgcagtacgcacggcccaagccaggcagccccaggcccttcttctggatgttcgtggacaatctggtgctgaacaaggaagacctggacgtcgcatctcgcttcctggagatggagccagtcaccatcccagatgtccacggcggatccttgcagaatgctgtccgcgtgtggagcaacatcccagccataaggagcagcaggcactgggctctggtttcggaagaagaattgtccctgctggcccagaacaagcagagctcgaagctcgcggccaagtggcccaccaagctggtgaagaactgctttctccccctaagagaatatttcaagtatttttcaggagggccgagctctggcgcacccccaccaagtggagggtctcctgccgggtccccaacatctactgaagaaggcaccagcgaatccgcaacgcccgagtcaggccctggtacctccacagaaccatctgaaggtagtgcgcctggttccccagctggaagccctacttccaccgaagaaggcacgtcaaccgaaccaagtgaaggatctgcccctgggaccagcactgaaccatctgagatgaacaattcccagggaagagtgaccttcgaggacgtgaccgtgaacttcacccaaggcgagtggcagagactgaaccccgagcagagaaacctgtaccgggacgtgatgctggaaaactacagcaacctggtgtccgtcggccagggcgagacaacaaagcctgacgtgatcctgcggctggaacagggcaaagagccttggctggaagaggaagaggtgctcggatctggcagagccgagaagaatggcgatatcggcggacagatctggaagccaaaggatgtgaaagagagtctcagcggcagcggcagcggatcaggcggatctggcagcggtggatctggttctggatccggcggctccggtagtggtggaagtggctctggggagacccccggtaccagcgagggcggccctggcacctccacagaaccatctgaaggtagtgcgcctggttccccagctggaagccctacttccaccgaagaaggcacgtcaaccgaaccaagtgaaggatctgcccctgggaccagcactgaaccatctgagccaaaaaagaagagaaaggtaatggacaagaagtacagcatcggcctggccatcggcaccaactctgtgggctgggccgtgatcaccgacgagtacaaggtgcccagcaagaaattcaaggtgctgggcaacaccgaccggcacagcatcaagaagaacctgatcggcgccctgctgttcgacagcggagaaacagccgaggccacccggctgaagagaaccgccagaagaagatacaccagacggaagaaccggatctgctatctgcaagagatcttcagcaacgagatggccaaggtggacgacagcttcttccacagactggaagagtccttcctggtggaagaggataagaagcacgagcggcaccccatcttcggcaacatcgtggacgaggtggcctaccacgagaagtaccccaccatctaccacctgagaaagaaactggtggacagcaccgacaaggccgacctgcggctgatctatctggccctggcccacatgatcaagttccggggccacttcctgatcgagggcgacctgaaccccgacaacagcgacgtggacaagctgttcatccagctggtgcagacctacaaccagctgttcgaggaaaaccccatcaacgccagcggcgtggacgccaaggccatcctgtctgccagactgagcaagagcagacggctggaaaatctgatcgcccagctgcccggcgagaagaagaatggcctgttcggcaacctgattgccctgagcctgggcctgacccccaacttcaagagcaacttcgacctggccgaggatgccaaactgcagctgagcaaggacacctacgacgacgacctggacaacctgctggcccagatcggcgaccagtacgccgacctgtttctggccgccaagaacctgtccgacgccatcctgctgagcgacatcctgagagtgaacaccgagatcaccaaggcccccctgagcgcctctatgatcaagagatacgacgagcaccaccaggacctgaccctgctgaaagctctcgtgcggcagcagctgcctgagaagtacaaagagattttcttcgaccagagcaagaacggctacgccggctacatcgatggcggagccagccaggaagagttctacaagttcatcaagcccatcctggaaaagatggacggcaccgaggaactgctcgtgaagctgaacagagaggacctgctgcggaagcagcggaccttcgacaacggcagcatcccccaccagatccacctgggagagctgcacgccattctgcggcggcaggaagatttttacccattcctgaaggacaaccgggaaaagatcgagaagatcctgaccttccgcatcccctactacgtgggccctctggccaggggaaacagcagattcgcctggatgaccagaaagagcgaggaaaccatcaccccctggaacttcgaggaagtggtggacaagggcgccagcgcccagagcttcatcgagcggatgaccaacttcgataagaacctgcccaacgagaaggtgctgcccaagcacagcctgctgtacgagtacttcaccgtgtacaacgagctgaccaaagtgaaatacgtgaccgagggaatgagaaagcccgccttcctgagcggcgagcagaaaaaagccatcgtggacctgctgttcaagaccaaccggaaagtgaccgtgaagcagctgaaagaggactacttcaagaaaatcgagtgcttcgactccgtggaaatctccggcgtggaagatcggttcaacgcctccctgggcacataccacgatctgctgaaaattatcaaggacaaggacttcctggacaatgaggaaaacgaggacattctggaagatatcgtgctgaccctgacactgtttgaggacagagagatgatcgaggaacggctgaaaacctatgcccacctgttcgacgacaaagtgatgaagcagctgaagcggcggagatacaccggctggggcaggctgagccggaagctgatcaacggcatccgggacaagcagtccggcaagacaatcctggatttcctgaagtccgacggcttcgccaacagaaacttcatgcagctgatccacgacgacagcctgacctttaaagaggacatccagaaagcccaggtgtccggccagggcgatagcctgcacgagcacattgccaatctggccggcagccccgccattaagaagggcatcctgcagacagtgaaggtggtggacgagctcgtgaaagtgatgggccggcacaagcccgagaacatcgtgatcgaaatggccagagagaaccagaccacccagaagggacagaagaacagccgcgagagaatgaagcggatcgaagagggcatcaaagagctgggcagccagatcctgaaagaacaccccgtggaaaacacccagctgcagaacgagaagctgtacctgtactacctgcagaatgggcgggatatgtacgtggaccaggaactggacatcaaccggctgtccgactacgatgtggacgctatcgtgcctcagagctttctgaaggacgactccatcgataacaaagtgctgactcggagcgacaagaaccggggcaagagcgacaacgtgccctccgaagaggtcgtgaagaagatgaagaactactggcgccagctgctgaatgccaagctgattacccagaggaagttcgacaatctgaccaaggccgagagaggcggcctgagcgaactggataaggccggcttcatcaagagacagctggtggaaacccggcagatcacaaagcacgtggcacagatcctggactcccggatgaacactaagtacgacgagaacgacaaactgatccgggaagtgaaagtgatcaccctgaagtccaagctggtgtccgatttccggaaggatttccagttttacaaagtgcgcgagatcaacaactaccaccacgcccacgacgcctacctgaacgccgtcgtgggaaccgccctgatcaaaaagtaccctaagctggaaagcgagttcgtgtacggcgactacaaggtgtacgacgtgcggaagatgatcgccaagagcgagcaggaaatcggcaaggctaccgccaagtacttcttctacagcaacatcatgaactttttcaagaccgagattaccctggccaacggcgagatccggaagcggcctctgatcgagacaaacggcgaaacaggcgagatcgtgtgggataagggccgggactttgccaccgtgcggaaagtgctgtctatgccccaagtgaatatcgtgaaaaagaccgaggtgcagacaggcggcttcagcaaagagtctatcctgcccaagaggaacagcgacaagctgatcgccagaaagaaggactgggaccctaagaagtacggcggcttcgacagccccaccgtggcctattctgtgctggtggtggccaaagtggaaaagggcaagtccaagaaactgaagagtgtgaaagagctgctggggatcaccatcatggaaagaagcagcttcgagaagaatcccatcgactttctggaagccaagggctacaaagaagtgaaaaaggacctgatcatcaagctgcctaagtactccctgttcgagctggaaaacggccggaagagaatgctggcctctgccggcgaactgcagaagggaaacgaactggccctgccctccaaatatgtgaacttcctgtacctggccagccactatgagaagctgaagggctcccccgaggataatgagcagaaacagctgtttgtggaacagcacaaacactacctggacgagatcatcgagcagatcagcgagttctccaagagagtgatcctggccgacgctaatctggacaaggtgctgagcgcctacaacaagcacagagacaagcctatcagagagcaggccgagaatatcatccacctgtttaccctgaccaatctgggagcccctgccgccttcaagtactttgacaccaccatcgaccggaagaggtacaccagcaccaaagaggtgctggacgccaccctgatccaccagagcatcaccggcctgtacgagacacggatcgacctgtctcagctgggaggcgacgcctatccctatgacgtgcccgattatgccagcctgggcagcggctcccccaagaaaaaacgcaaggtggaagatcctaagaaaaagcggaaagtggacggcctcgagtaatgagatcccaagcacgcagcaatgcagctcaaaacgcttagcctagccacacccccacgggaaacagcagtgattaacctttagcaataaacgaaagtttaactaagctatactaaccccagggttggtcaatttcgtgccagccacaccctggtactgcatgcacgcaatgctagctgcccctttcccgtcctgggcaccccgagtctcccccgaccccgggtcccaggtatgctcccacctccacctgccccactcaccacctctgctagttccagacacctccgagacgaggaaaaaaaaaaaaaaaaaaaaaaaaaaaaaaaaaaaaaaaaaaaaaaaaaaaaaaaaaaaaaaaaaaaaaaaaaaaaaaaaaaaaaaaaaaaaaaaaaaaaaaaaaaaaaaaaaaaaaaaaaaaaaaaaaaaaaaaaaaaaaaaaaaaaaaaaaaaaaaaaaaaaaaaaaaaaaaaaaaaaaaaaaaaaaaaaaaaaaaaaaaaaaaaaaaaaaaaaaaaaaaaaaaaaaaaaaaaaaaaaaaaaaaaaaaaaaaaaaaaaaaaaaaaaaaaaaaaaaaaaaaaaaaaaaaaaaaaaaaaaaaaaaaaaaaaaaaaaaaaaaaaaaaaaaaaaaaaaaaaaaaaaaaaaaaaaaaaaaaaaaaaaaaaaaaaaaaaaaaaaaaaaaaaaaaaaaaccgtcttcaagctttctagaaattcactggccgtcgttttacaacgtcgtgactgggaaaaccctggcgttacccaacttaatcgccttgcagcacatccccctttcgccagctggcgtaatagcgaagaggcccgcaccgatcgcccttcccaacagttgcgcagcctgaatggcgaatggcgcctgatgcggtattttctccttacgcatctgtgcggtatttcacaccgcatatggtgcactctcagtacaatctgctctgatgccgcatagttaagccagccccgacacccgccaacacccgctgacgcgccctgacgggcttgtctgctcccggcatccgcttacagacaagctgtgaccgtctccgggagctgcatgtgtcagaggttttcaccgtcatcaccgaaacgcgcgagacgaaagggcctcgtgatacgcctatttttataggttaatgtcatgataataatggtttcttagacgtcaggtggcacttttcggggaaatgtgcgcggaacccctatttgtttatttttctaaatacattcaaatatgtatccgctcatgagacaataaccctgataaatgcttcaataatattgaaaaaggaagagtatgagtattcaacatttccgtgtcgcccttattcccttttttgcggcattttgccttcctgtttttgctcacccagaaacgctggtgaaagtaaaagatgctgaagatcagttgggtgcacgagtgggttacatcgaactggatctcaacagcggtaagatccttgagagttttcgccccgaagaacgttttccaatgatgagcacttttaaagttctgctatgtggcgcggtattatcccgtattgacgccgggcaagagcaactcggtcgccgcatacactattctcagaatgacttggttgagtactcaccagtcacagaaaagcatcttacggatggcatgacagtaagagaattatgcagtgctgccataaccatgagtgataacactgcggccaacttacttctgacaacgatcggaggaccgaaggagctaaccgcttttttgcacaacatgggggatcatgtaactcgccttgatcgttgggaaccggagctgaatgaagccataccaaacgacgagcgtgacaccacgatgcctgtagcaatggcaacaacgttgcgcaaactattaactggcgaactacttactctagcttcccggcaacaattaatagactggatggaggcggataaagttgcaggaccacttctgcgctcggcccttccggctggctggtttattgctgataaatctggagccggtgagcgtgggtctcgcggtatcattgcagcactggggccagatggtaagccctcccgtatcgtagttatctacacgacggggagtcaggcaactatggatgaacgaaatagacagatcgctgagataggtgcctcactgattaagcattggtaactgtcagaccaagtttactcatatatactttagattgatttaaaacttcatttttaatttaaaaggatctaggtgaagatccttttt

SEQ ID NO: 164 - DNA, 9059 bp, synthetic construct
  misc_feature 1..9059: note = V46 DNA
  source 1..9059: mol_type = other DNA
tgataatagggatcccaagcacgcagcaatgcagctcaaaacgcttagcctagccacacccccacgggaaacagcagtgattaacctttagcaataaacgaaagtttaactaagctatactaaccccagggttggtcaatttcgtgccagccacaccctggtactgcatgcacgcaatgctagctgcccctttcccgtcctgggcaccccgagtctcccccgaccccgggtcccaggtatgctcccacctccacctgccccactcaccacctctgctagttccagacacctccgaagatggaaaaaaaaaaaaaaaaaaaaaaaaaaaaaaaaaaaaaaaaaaaaaaaaaaaaaaaaaaaaaaaaaaaaaaaaaaaaaaaaaaaaaaaaaaaaaaaaaaaaaaaaaaaaaaaaaaaaaaaaaaaagcttggatcattgtcactttcaccgtcatcaccgaaacgcgcgatgcagctctggcccgtgtctcaaaatctctgatgttacattgcacaagataaaaatatatcatcatgaacaataaaactgtctgcttacataaacagtaatacaaggggtgttatgagccatattcaacgggaaacgtcgaggccgcgattaaattccaacatggatgctgatttatatgggtataaatgggctcgcgataatgtcgggcaatcaggtgcgacaatctatcgcttgtatgggaagcccgatgcgccagagttgtttctgaaacatggcaaaggtagcgttgccaatgatgttacagatgagatggtcagactaaactggctgacggaatttatgcctcttccgaccatcaagcattttatccgtactcctgatgatgcatggttactcaccactgcgatccccggaaaaacagcattccaggtattagaagaatatcctgattcaggtgaaaatattgttgatgcgctggcagtgttcctgcgccggttgcattcgattcctgtttgtaattgtccttttaacagcgatcgcgtatttcgtctcgctcaggcgcaatcacgaatgaataacggtttggttgatgcgagtgattttgatgacgagcgtaatggctggcctgttgaacaagtctggaaagaaatgcataaacttttgccattctcaccggattcagtcgtcactcatggtgatttctcacttgataaccttatttttgacgaggggaaattaataggttgtattgatgttggacgagtcggaatcgcagaccgataccaggatcttgccatcctatggaactgcctcggtgagttttctccttcattacagaaacggctttttcaaaaatatggtattgataatcctgatatgaataaattgcagtttcatttgatgctcgatgagtttttctaatcagaattggttaattggttgtaacattattcagattgggcttgatttaaaacttcatttttaatttaaaaggatctaggtgaagatcctttttgataatctcatgaccaaaatcccttaacgtgagttttcgttccactgagcgtcagaccccgtagaaaagatcaaaggatcttcttgagatcctttttttctgcgcgtaatctgctgcttgcaaacaaaaaaaccaccgctaccagcggtggtttgtttgccggatcaagagctaccaactctttttccgaaggtaactggcttcagcagagcgcagataccaaatactgttcttctagtgtagccgtagttaggccaccacttcaagaactctgtagcaccgcctacatacctcgctctgctaatcctgttaccagtggctgctgccagtggcgataagtcgtgtcttaccgggttggactcaagacgatagttaccggataaggcgcagcggtcgggctgaacggggggttcgtgcacacagcccagcttggagcgaacgacctacaccgaactgagatacctacagcgtgagctatgagaaagcgccacgcttcccgaagggagaaaggcggacaggtatccggtaagcggcagggtcggaacaggagagcgcacgagggagcttccagggggaaacgcctggtatctttatagtcctgtcgggtttcgccacctctgacttgagcgtcgatttttgtgatgctcgtcaggggggcggagcctatggaaaaacgccagcaacgcggcctttttacggttcctggccttttgctggccttttgctcacattctagataatacgactcactataaggactcactatttgttttcgcgcccagttgcaaaaagtgtcgacatttgcttctgacacaactgtgttcactagcaacctcaaacagacaccgccaccatggtgcctgccgccaagagagtgaagctggacggcagcaaccacgaccaagagttcgaccctcctaaggtgtaccctcctgtgccagccgagaagcggaagcctatcagagtgctgagcctgttcgacggaatcgccacaggactgctggtgctgaaggatctgggaatccaggtggaccggtatatcgccagcgaagtgtgcgaggacagcatcacagttggcatggttcgacaccagggcaagattatgtacgtgggcgacgtgcggagcgtgacccagaaacacattcaagagtggggccccttcgacctggttatcggcggcagcccttgcaacgatctgagcatcgtgaaccccgccagaaagggcctgtatgaaggcaccggcagactgttcttcgagttctacagactgctgcacgacgccagacctaaagagggcgacgacagaccattcttctggctgttcgagaacgtggtggctatgggcgtgtccgacaagcgggacatcagccggtttctggaaagcaaccccgtgatgatcgacgccaaagaggtgtccgctgctcaccgggccagatacttttggggcaatctgcccggcatgaacagacctctggccagcaccgtgaacgacaagctggaactgcaagagtgcctggaacacggccggatcgccaagtttagcaaagtgcggaccatcaccaccaggtccaacagcatcaagcagggcaaagaccagcacttccccgtgttcatgaatgagaaagaggacatcctgtggtgcaccgagatggaaagagtgttcggcttccctgtgcactacaccgacgtgtccaacatgagcagactggccagacagaggctgctgggcagatcttggagcgtgccagtgatcagacacctgttcgcccctctgaaagaatacttcgcctgcgtgtccagcggcaacagcaacgccaatagcagaggccctagcttcagctctggactggtgcctttgagcctgagaggcagccacatgttcgagacagtgcctgtgtggcggagacagcccgttagagtgctgtccctgtttgaggacatcaagaaagagctgaccagcctgggcttcctggaaagcggatctgatcctggccagctgaagcacgtggtggacgtgaccgataccgtgcggaaggatgtggaagaatggggcccttttgatctggtgtacggcgccacacctcctctgggccacacatgtgatagacctccaagctggtatctgttccagttccaccggctgctgcagtacgctagacccaagcctggaagccccaggcctttcttttggatgttcgtggacaacctggtcctgaacaaagaggacctggacgtcgccagccggttcctcgaaatggaacctgtgacaatccccgacgtgcacggcggatctctgcagaatgctgtcagagtgtggtctaacatccccgccatcagaagcagcagacactgggcccttgtgtccgaggaagaactgtctctgctggcccagaacaagcagagcagcaagctggccgccaagtggcctacaaagctggtcaagaactgcttcctgcctctgcgcgagtacttcaagtatttcagcggcggacctagctctggcgcccctccacctagcggaggatctccagcaggatctcctaccagcaccgaggaaggcacaagcgagtctgccacacctgagtctggccctggcacatctacagagcctagcgagggatctgcccctggatctcctgctggcagccctacatctaccgaagagggaaccagcacagagccttccgaaggttctgctcctggcacaagcaccgagccaagcgagcctaagaagaagagaaaagtcggcagcggcagcgagacaccaggcacatctgaaagcgctacccctgagagcatgaacaacagccagggcagagtgaccttcgaggatgtgaccgtgaacttcacccaaggcgagtggcagagactgaaccccgagcagagaaacctgtaccgggacgtgatgctggaaaactacagcaacctggtgtccgtcggccagggcgagacaacaaagcctgacgtgatcctgcggctggaacagggaaaagagccttggctggaagaggaagaggtgctcggatctggacgggccgagaagaacggcgatattggcggacagatctggaagcctaaggacgtgaaagagagcctgagcggctctggaagtggctctggtggatctggtagcggaggttctggttccggttctggtggttcaggatctggcggttctggaagcggcgaaacacctggaacaagcgaaggcggaccaggcacctctaccgaaccatctgagggaagcgctccaggttctcctgccggctctccaacaagcacagaagagggcacctccactgagccctctgaaggcagtgctcctggaacttccaccgaaccttccgagccaaagaagaaacgcaaggtgggctccgacaagaagtacagcatcggcctggccatcggcaccaactctgtgggctgggccgtgatcaccgacgagtacaaggtgcccagcaagaaattcaaggtgctgggcaacaccgaccggcacagcatcaagaagaacctgatcggcgccctgctgttcgacagcggagaaacagccgaggccacccggctgaagagaaccgccagaagaagatacaccagacggaagaaccggatctgctatctgcaagagatcttcagcaacgagatggccaaggtggacgacagcttcttccacagactggaagagtccttcctggtggaagaggataagaagcacgagcggcaccccatcttcggcaacatcgtggacgaggtggcctaccacgagaagtaccccaccatctaccacctgagaaagaaactggtggacagcaccgacaaggccgacctgcggctgatctatctggccctggcccacatgatcaagttccggggccacttcctgatcgagggcgacctgaaccccgacaacagcgacgtggacaagctgttcatccagctggtgcagacctacaaccagctgttcgaggaaaaccccatcaacgccagcggcgtggacgccaaggccatcctgtctgccagactgagcaagagcagacggctggaaaatctgatcgcccagctgcccggcgagaagaagaatggcctgttcggcaacctgattgccctgagcctgggcctgacccccaacttcaagagcaacttcgacctggccgaggatgccaaactgcagctgagcaaggacacctacgacgacgacctggacaacctgctggcccagatcggcgaccagtacgccgacctgtttctggccgccaagaacctgtccgacgccatcctgctgagcgacatcctgagagtgaacaccgagatcaccaaggcccccctgagcgcctctatgatcaagagatacgacgagcaccaccaggacctgaccctgctgaaagctctcgtgcggcagcagctgcctgagaagtacaaagagattttcttcgaccagagcaagaacggctacgccggctacatcgatggcggagccagccaggaagagttctacaagttcatcaagcccatcctggaaaagatggacggcaccgaggaactgctcgtgaagctgaacagagaggacctgctgcggaagcagcggaccttcgacaacggcagcatcccccaccagatccacctgggagagctgcacgccattctgcggcggcaggaagatttttacccattcctgaaggacaaccgggaaaagatcgagaagatcctgaccttccgcatcccctactacgtgggccctctggccaggggaaacagcagattcgcctggatgaccagaaagagcgaggaaaccatcaccccctggaacttcgaggaagtggtggacaagggcgccagcgcccagagcttcatcgagcggatgaccaacttcgataagaacctgcccaacgagaaggtgctgcccaagcacagcctgctgtacgagtacttcaccgtgtacaacgagctgaccaaagtgaaatacgtgaccgagggaatgagaaagcccgccttcctgagcggcgagcagaaaaaagccatcgtggacctgctgttcaagaccaaccggaaagtgaccgtgaagcagctgaaagaggactacttcaagaaaatcgagtgcttcgactccgtggaaatctccggcgtggaagatcggttcaacgcctccctgggcacataccacgatctgctgaaaattatcaaggacaaggacttcctggacaatgaggaaaacgaggacattctggaagatatcgtgctgaccctgacactgtttgaggacagagagatgatcgaggaacggctgaaaacctatgcccacctgttcgacgacaaagtgatgaagcagctgaagcggcggagatacaccggctggggcaggctgagccggaagctgatcaacggcatccgggacaagcagtccggcaagacaatcctggatttcctgaagtccgacggcttcgccaacagaaacttcatgcagctgatccacgacgacagcctgacctttaaagaggacatccagaaagcccaggtgtccggccagggcgatagcctgcacgagcacattgccaatctggccggcagccccgccattaagaagggcatcctgcagacagtgaaggtggtggacgagctcgtgaaagtgatgggccggcacaagcccgagaacatcgtgatcgaaatggccagagagaaccagaccacccagaagggacagaagaacagccgcgagagaatgaagcggatcgaagagggcatcaaagagctgggcagccagatcctgaaagaacaccccgtggaaaacacccagctgcagaacgagaagctgtacctgtactacctgcagaatgggcgggatatgtacgtggaccaggaactggacatcaaccggctgtccgactacgatgtggacgctatcgtgcctcagagctttctgaaggacgactccatcgataacaaagtgctgactcggagcgacaagaaccggggcaagagcgacaacgtgccctccgaagaggtcgtgaagaagatgaagaactactggcgccagctgctgaatgccaagctgattacccagaggaagttcgacaatctgaccaaggccgagagaggcggcctgagcgaactggataaggccggcttcatcaagagacagctggtggaaacccggcagatcacaaagcacgtggcacagatcctggactcccggatgaacactaagtacgacgagaacgacaaactgatccgggaagtgaaagtgatcaccctgaagtccaagctggtgtccgatttccggaaggatttccagttttacaaagtgcgcgagatcaacaactaccaccacgcccacgacgcctacctgaacgccgtcgtgggaaccgccctgatcaaaaagtaccctaagctggaaagcgagttcgtgtacggcgactacaaggtgtacgacgtgcggaagatgatcgccaagagcgagcaggaaatcggcaaggctaccgccaagtacttcttctacagcaacatcatgaactttttcaagaccgagattaccctggccaacggcgagatccggaagcggcctctgatcgagacaaacggcgaaacaggcgagatcgtgtgggataagggccgggactttgccaccgtgcggaaagtgctgtctatgccccaagtgaatatcgtgaaaaagaccgaggtgcagacaggcggcttcagcaaagagtctatcctgcccaagaggaacagcgacaagctgatcgccagaaagaaggactgggaccctaagaagtacggcggcttcgacagccccaccgtggcctattctgtgctggtggtggccaaagtggaaaagggcaagtccaagaaactgaagagtgtgaaagagctgctggggatcaccatcatggaaagaagcagcttcgagaagaatcccatcgactttctggaagccaagggctacaaagaagtgaaaaaggacctgatcatcaagctgcctaagtactccctgttcgagctggaaaacggccggaagagaatgctggcctctgccggcgaactgcagaagggaaacgaactggccctgccctccaaatatgtgaacttcctgtacctggccagccactatgagaagctgaagggctcccccgaggataatgagcagaaacagctgtttgtggaacagcacaaacactacctggacgagatcatcgagcagatcagcgagttctccaagagagtgatcctggccgacgctaatctggacaaggtgctgagcgcctacaacaagcacagagacaagcctatcagagagcaggccgagaatatcatccacctgtttaccctgaccaatctgggagcccctgccgccttcaagtactttgacaccaccatcgaccggaagaggtacaccagcaccaaagaggtgctggacgccaccctgatccaccagagcatcaccggcctgtacgagacacggatcgacctgtctcagctgggaggcgacgcctatccctatgacgtgcccgattatgccagcctgggcagcggctcccccaagaaaaaacgcaaggtggaagatcctaagaaaaagcggaaagtg

SEQ ID NO: 165 - DNA, 10020 bp, synthetic construct
  misc_feature 1..10020: note = V47 DNA
  source 1..10020: mol_type = other DNA
gcctcactgattaagcattggtaactgtcagaccaagtttactcatatatactttagattgatttaaaacttcatttttaatttaaaaggatctaggtgaagatcctttttgataatctcatgaccaaaatcccttaacgtgagttttcgttccactgagcgtcagaccccgtagaaaagatcaaaggatcttcttgagatcctttttttctgcgcgtaatctgctgcttgcaaacaaaaaaaccaccgctaccagcggtggtttgtttgccggatcaagagctaccaactctttttccgaaggtaactggcttcagcagagcgcagataccaaatactgttcttctagtgtagccgtagttaggccaccacttcaagaactctgtagcaccgcctacatacctcgctctgctaatcctgttaccagtggctgctgccagtggcgataagtcgtgtcttaccgggttggactcaagacgatagttaccggataaggcgcagcggtcgggctgaacggggggttcgtgcacacagcccagcttggagcgaacgacctacaccgaactgagatacctacagcgtgagctatgagaaagcgccacgcttcccgaagggagaaaggcggacaggtatccggtaagcggcagggtcggaacaggagagcgcacgagggagcttccagggggaaacgcctggtatctttatagtcctgtcgggtttcgccacctctgacttgagcgtcgatttttgtgatgctcgtcaggggggcggagcctatggaaaaacgccagcaacgcggcctttttacggttcctggccttttgctggccttttgctcacatgttctttcctgcgttatcccctgattctgtggataaccgtattaccgcctttgagtgagctgataccgctcgccgcagccgaacgaccgagcgcagcgagtcagtgagcgaggaagcggaagagcgcccaatacgcaaaccgcctctccccgcgcgttggccgattcattaatgcagctggcacgacaggtttcccgactggaaagcgggcagtgagcgcaacgcaattaatgtgagttagctcactcattaggcaccccaggctttacactttatgcttccggctcgtatgttgtgtggaattgtgagcggataacaatttcacacaggaaacagctatgaccatgattacgcctctagaaagctttaatacgactcactataaggactcactatttgttttcgcgcccagttgcaaaaagtgtcgacatttgcttctgacacaactgtgttcactagcaacctcaaacagacaccgccaccatgcctgctgctaagagagtgaaactggatggatccaaccatgaccaggaatttgaccccccaaaggtttacccacctgtgccagctgagaagaggaagcccatccgcgtgctgtctctctttgatgggattgctacagggctcctggtgctgaaggacctgggcatccaagtggaccgctacattgcctccgaggtgtgtgaggactccatcacggtgggcatggtgcggcaccagggaaagatcatgtacgtcggggacgtccgcagcgtcacacagaagcatatccaggagtggggcccattcgacctggtgattggaggcagtccctgcaatgacctctccattgtcaaccctgcccgcaagggactttatgagggtactggccgcctcttctttgagttctaccgcctcctgcatgatgcgcggcccaaggagggagatgatcgccccttcttctggctctttgagaatgtggtggccatgggcgttagtgacaagagggacatctcgcgatttcttgagtctaaccccgtgatgattgacgccaaagaagtgtctgctgcacacagggcccgttacttctggggtaaccttcctggcatgaacaggcctttggcatccactgtgaatgataagctggagctgcaagagtgtctggagcacggcagaatagccaagttcagcaaagtgaggaccattaccaccaggtcaaactctataaagcagggcaaagaccagcatttccccgtgttcatgaacgagaaggaggacatcctgtggtgcactgaaatggaaagggtgtttggcttccccgtccactacacagacgtctccaacatgagccgcttggcgaggcagagactgctgggccgatcgtggagcgtgccggtcatccgccacctcttcgctccgctgaaggaatattttgcttgtgtgtctagcggcaatagtaacgctaacagccgcgggccgagcttcagcagcggcctggtgccgttaagcttgcgcggcagccatatgttcgaaaccgtgcctgtgtggaggagacagccagtccgggtgctgtccctttttgaagacatcaagaaagagctgacgagtttgggctttttggaaagtggttctgacccgggacaactgaagcatgtggttgatgtcacagacacagtgaggaaggatgtggaggagtggggacccttcgatcttgtgtacggcgccacacctcccctgggccacacctgtgaccgtcctcccagctggtacctgttccagttccaccggctcctgcagtacgcacggcccaagccaggcagccccaggcccttcttctggatgttcgtggacaatctggtgctgaacaaggaagacctggacgtcgcatctcgcttcctggagatggagccagtcaccatcccagatgtccacggcggatccttgcagaatgctgtccgcgtgtggagcaacatcccagccataaggagcagcaggcactgggctctggtttcggaagaagaattgtccctgctggcccagaacaagcagagctcgaagctcgcggccaagtggcccaccaagctggtgaagaactgctttctccccctaagagaatatttcaagtatttttcaggagggccgagctctggcgcacccccaccaagtggagggtctcctgccgggtccccaacatctactgaagaaggcaccagcgaatccgcaacgcccgagtcaggccctggtacctccacagaaccatctgaaggtagtgcgcctggttccccagctggaagccctacttccaccgaagaaggcacgtcaaccgaaccaagtgaaggatctgcccctgggaccagcactgaaccatctgagcggacactcctgaccttcagagatgtggccatcgagttcagcctggaagagtggcagtgcctggacacagcccagcggaacctgtacagaaaagtgatgttcgagaactaccggaacctcgtgttcctgggaatcgccgtgtctaagccccacctgatcacctgtctcgagcaagggaaagaaccctggaacagcggcagcggcagcggatcaggcggatctggcagcggtggatctggttctggatccggcggctccggtagtggtggaagtggctctggggagacccccggtaccagcgagggcggccctggcacctccacagaaccatctgaaggtagtgcgcctggttccccagctggaagccctacttccaccgaagaaggcacgtcaaccgaaccaagtgaaggatctgcccctgggaccagcactgaaccatctgagccaaaaaagaagagaaaggtaatggacaagaagtacagcatcggcctggccatcggcaccaactctgtgggctgggccgtgatcaccgacgagtacaaggtgcccagcaagaaattcaaggtgctgggcaacaccgaccggcacagcatcaagaagaacctgatcggcgccctgctgttcgacagcggagaaacagccgaggccacccggctgaagagaaccgccagaagaagatacaccagacggaagaaccggatctgctatctgcaagagatcttcagcaacgagatggccaaggtggacgacagcttcttccacagactggaagagtccttcctggtggaagaggataagaagcacgagcggcaccccatcttcggcaacatcgtggacgaggtggcctaccacgagaagtaccccaccatctaccacctgagaaagaaactggtggacagcaccgacaaggccgacctgcggctgatctatctggccctggcccacatgatcaagttccggggccacttcctgatcgagggcgacctgaaccccgacaacagcgacgtggacaagctgttcatccagctggtgcagacctacaaccagctgttcgaggaaaaccccatcaacgccagcggcgtggacgccaaggccatcctgtctgccagactgagcaagagcagacggctggaaaatctgatcgcccagctgcccggcgagaagaagaatggcctgttcggcaacctgattgccctgagcctgggcctgacccccaacttcaagagcaacttcgacctggccgaggatgccaaactgcagctgagcaaggacacctacgacgacgacctggacaacctgctggcccagatcggcgaccagtacgccgacctgtttctggccgccaagaacctgtccgacgccatcctgctgagcgacatcctgagagtgaacaccgagatcaccaaggcccccctgagcgcctctatgatcaagagatacgacgagcaccaccaggacctgaccctgctgaaagctctcgtgcggcagcagctgcctgagaagtacaaagagattttcttcgaccagagcaagaacggctacgccggctacatcgatggcggagccagccaggaagagttctacaagttcatcaagcccatcctggaaaagatggacggcaccgaggaactgctcgtgaagctgaacagagaggacctgctgcggaagcagcggaccttcgacaacggcagcatcccccaccagatccacctgggagagctgcacgccattctgcggcggcaggaagatttttacccattcctgaaggacaaccgggaaaagatcgagaagatcctgaccttccgcatcccctactacgtgggccctctggccaggggaaacagcagattcgcctggatgaccagaaagagcgaggaaaccatcaccccctggaacttcgaggaagtggtggacaagggcgccagcgcccagagcttcatcgagcggatgaccaacttcgataagaacctgcccaacgagaaggtgctgcccaagcacagcctgctgtacgagtacttcaccgtgtacaacgagctgaccaaagtgaaatacgtgaccgagggaatgagaaagcccgccttcctgagcggcgagcagaaaaaagccatcgtggacctgctgttcaagaccaaccggaaagtgaccgtgaagcagctgaaagaggactacttcaagaaaatcgagtgcttcgactccgtggaaatctccggcgtggaagatcggttcaacgcctccctgggcacataccacgatctgctgaaaattatcaaggacaaggacttcctggacaatgaggaaaacgaggacattctggaagatatcgtgctgaccctgacactgtttgaggacagagagatgatcgaggaacggctgaaaacctatgcccacctgttcgacgacaaagtgatgaagcagctgaagcggcggagatacaccggctggggcaggctgagccggaagctgatcaacggcatccgggacaagcagtccggcaagacaatcctggatttcctgaagtccgacggcttcgccaacagaaacttcatgcagctgatccacgacgacagcctgacctttaaagaggacatccagaaagcccaggtgtccggccagggcgatagcctgcacgagcacattgccaatctggccggcagccccgccattaagaagggcatcctgcagacagtgaaggtggtggacgagctcgtgaaagtgatgggccggcacaagcccgagaacatcgtgatcgaaatggccagagagaaccagaccacccagaagggacagaagaacagccgcgagagaatgaagcggatcgaagagggcatcaaagagctgggcagccagatcctgaaagaacaccccgtggaaaacacccagctgcagaacgagaagctgtacctgtactacctgcagaatgggcgggatatgtacgtggaccaggaactggacatcaaccggctgtccgactacgatgtggacgctatcgtgcctcagagctttctgaaggacgactccatcgataacaaagtgctgactcggagcgacaagaaccggggcaagagcgacaacgtgccctccgaagaggtcgtgaagaagatgaagaactactggcgccagctgctgaatgccaagctgattacccagaggaagttcgacaatctgaccaaggccgagagaggcggcctgagcgaactggataaggccggcttcatcaagagacagctggtggaaacccggcagatcacaaagcacgtggcacagatcctggactcccggatgaacactaagtacgacgagaacgacaaactgatccgggaagtgaaagtgatcaccctgaagtccaagctggtgtccgatttccggaaggatttccagttttacaaagtgcgcgagatcaacaactaccaccacgcccacgacgcctacctgaacgccgtcgtgggaaccgccctgatcaaaaagtaccctaagctggaaagcgagttcgtgtacggcgactacaaggtgtacgacgtgcggaagatgatcgccaagagcgagcaggaaatcggcaaggctaccgccaagtacttcttctacagcaacatcatgaactttttcaagaccgagattaccctggccaacggcgagatccggaagcggcctctgatcgagacaaacggcgaaacaggcgagatcgtgtgggataagggccgggactttgccaccgtgcggaaagtgctgtctatgccccaagtgaatatcgtgaaaaagaccgaggtgcagacaggcggcttcagcaaagagtctatcctgcccaagaggaacagcgacaagctgatcgccagaaagaaggactgggaccctaagaagtacggcggcttcgacagccccaccgtggcctattctgtgctggtggtggccaaagtggaaaagggcaagtccaagaaactgaagagtgtgaaagagctgctggggatcaccatcatggaaagaagcagcttcgagaagaatcccatcgactttctggaagccaagggctacaaagaagtgaaaaaggacctgatcatcaagctgcctaagtactccctgttcgagctggaaaacggccggaagagaatgctggcctctgccggcgaactgcagaagggaaacgaactggccctgccctccaaatatgtgaacttcctgtacctggccagccactatgagaagctgaagggctcccccgaggataatgagcagaaacagctgtttgtggaacagcacaaacactacctggacgagatcatcgagcagatcagcgagttctccaagagagtgatcctggccgacgctaatctggacaaggtgctgagcgcctacaacaagcacagagacaagcctatcagagagcaggccgagaatatcatccacctgtttaccctgaccaatctgggagcccctgccgccttcaagtactttgacaccaccatcgaccggaagaggtacaccagcaccaaagaggtgctggacgccaccctgatccaccagagcatcaccggcctgtacgagacacggatcgacctgtctcagctgggaggcgacgcctatccctatgacgtgcccgattatgccagcctgggcagcggctcccccaagaaaaaacgcaaggtggaagatcctaagaaaaagcggaaagtggacggcctcgagtaatgagatcccaagcacgcagcaatgcagctcaaaacgcttagcctagccacacccccacgggaaacagcagtgattaacctttagcaataaacgaaagtttaactaagctatactaaccccagggttggtcaatttcgtgccagccacaccctggtactgcatgcacgcaatgctagctgcccctttcccgtcctgggcaccccgagtctcccccgaccccgggtcccaggtatgctcccacctccacctgccccactcaccacctctgctagttccagacacctccgagacgaggaaaaaaaaaaaaaaaaaaaaaaaaaaaaaaaaaaaaaaaaaaaaaaaaaaaaaaaaaaaaaaaaaaaaaaaaaaaaaaaaaaaaaaaaaaaaaaaaaaaaaaaaaaaaaaaaaaaaaaaaaaaaaaaaaaaaaaaaaaaaaaaaaaaaaaaaaaaaaaaaaaaaaaaaaaaaaaaaaaaaaaaaaaaaaaaaaaaaaaaaaaaaaaaaaaaaaaaaaaaaaaaaaaaaaaaaaaaaaaaaaaaaaaaaaaaaaaaaaaaaaaaaaaaaaaaaaaaaaaaaaaaaaaaaaaaaaaaaaaaaaaaaaaaaaaaaaaaaaaaaaaaaaaaaaaaaaaaaaaaaaaaaaaaaaaaaaaaaaaaaaaaaaaaaaaaaaaaaaaaaaaaaaaaaaaaaaaccgtcttcaagctttctagaaattcactggccgtcgttttacaacgtcgtgactgggaaaaccctggcgttacccaacttaatcgccttgcagcacatccccctttcgccagctggcgtaatagcgaagaggcccgcaccgatcgcccttcccaacagttgcgcagcctgaatggcgaatggcgcctgatgcggtattttctccttacgcatctgtgcggtatttcacaccgcatatggtgcactctcagtacaatctgctctgatgccgcatagttaagccagccccgacacccgccaacacccgctgacgcgccctgacgggcttgtctgctcccggcatccgcttacagacaagctgtgaccgtctccgggagctgcatgtgtcagaggttttcaccgtcatcaccgaaacgcgcgagacgaaagggcctcgtgatacgcctatttttataggttaatgtcatgataataatggtttcttagacgtcaggtggcacttttcggggaaatgtgcgcggaacccctatttgtttatttttctaaatacattcaaatatgtatccgctcatgagacaataaccctgataaatgcttcaataatattgaaaaaggaagagtatgagtattcaacatttccgtgtcgcccttattcccttttttgcggcattttgccttcctgtttttgctcacccagaaacgctggtgaaagtaaaagatgctgaagatcagttgggtgcacgagtgggttacatcgaactggatctcaacagcggtaagatccttgagagttttcgccccgaagaacgttttccaatgatgagcacttttaaagttctgctatgtggcgcggtattatcccgtattgacgccgggcaagagcaactcggtcgccgcatacactattctcagaatgacttggttgagtactcaccagtcacagaaaagcatcttacggatggcatgacagtaagagaattatgcagtgctgccataaccatgagtgataacactgcggccaacttacttctgacaacgatcggaggaccgaaggagctaaccgcttttttgcacaacatgggggatcatgtaactcgccttgatcgttgggaaccggagctgaatgaagccataccaaacgacgagcgtgacaccacgatgcctgtagcaatggcaacaacgttgcgcaaactattaactggcgaactacttactctagcttcccggcaacaattaatagactggatggaggcggataaagttgcaggaccacttctgcgctcggcccttccggctggctggtttattgctgataaatctggagccggtgagcgtgggtctcgcggtatcattgcagcactggggccagatggtaagccctcccgtatcgtagttatctacacgacggggagtcaggcaactatggatgaacgaaatagacagatcgctgagataggt

SEQ ID NO: 166 - DNA, 10020 bp, synthetic construct
  misc_feature 1..10020: note = V48 DNA
  source 1..10020: mol_type = other DNA
gcctcactgattaagcattggtaactgtcagaccaagtttactcatatatactttagattgatttaaaacttcatttttaatttaaaaggatctaggtgaagatcctttttgataatctcatgaccaaaatcccttaacgtgagttttcgttccactgagcgtcagaccccgtagaaaagatcaaaggatcttcttgagatcctttttttctgcgcgtaatctgctgcttgcaaacaaaaaaaccaccgctaccagcggtggtttgtttgccggatcaagagctaccaactctttttccgaaggtaactggcttcagcagagcgcagataccaaatactgttcttctagtgtagccgtagttaggccaccacttcaagaactctgtagcaccgcctacatacctcgctctgctaatcctgttaccagtggctgctgccagtggcgataagtcgtgtcttaccgggttggactcaagacgatagttaccggataaggcgcagcggtcgggctgaacggggggttcgtgcacacagcccagcttggagcgaacgacctacaccgaactgagatacctacagcgtgagctatgagaaagcgccacgcttcccgaagggagaaaggcggacaggtatccggtaagcggcagggtcggaacaggagagcgcacgagggagcttccagggggaaacgcctggtatctttatagtcctgtcgggtttcgccacctctgacttgagcgtcgatttttgtgatgctcgtcaggggggcggagcctatggaaaaacgccagcaacgcggcctttttacggttcctggccttttgctggccttttgctcacatgttctttcctgcgttatcccctgattctgtggataaccgtattaccgcctttgagtgagctgataccgctcgccgcagccgaacgaccgagcgcagcgagtcagtgagcgaggaagcggaagagcgcccaatacgcaaaccgcctctccccgcgcgttggccgattcattaatgcagctggcacgacaggtttcccgactggaaagcgggcagtgagcgcaacgcaattaatgtgagttagctcactcattaggcaccccaggctttacactttatgcttccggctcgtatgttgtgtggaattgtgagcggataacaatttcacacaggaaacagctatgaccatgattacgcctctagaaagctttaatacgactcactataaggactcactatttgttttcgcgcccagttgcaaaaagtgtcgacatttgcttctgacacaactgtgttcactagcaacctcaaacagacaccgccaccatgcctgctgctaagagagtgaaactggatggatccaaccatgaccaggaatttgaccccccaaaggtttacccacctgtgccagctgagaagaggaagcccatccgcgtgctgtctctctttgatgggattgctacagggctcctggtgctgaaggacctgggcatccaagtggaccgctacattgcctccgaggtgtgtgaggactccatcacggtgggcatggtgcggcaccagggaaagatcatgtacgtcggggacgtccgcagcgtcacacagaagcatatccaggagtggggcccattcgacctggtgattggaggcagtccctgcaatgacctctccattgtcaaccctgcccgcaagggactttatgagggtactggccgcctcttctttgagttctaccgcctcctgcatgatgcgcggcccaaggagggagatgatcgccccttcttctggctctttgagaatgtggtggccatgggcgttagtgacaagagggacatctcgcgatttcttgagtctaaccccgtgatgattgacgccaaagaagtgtctgctgcacacagggcccgttacttctggggtaaccttcctggcatgaacaggcctttggcatccactgtgaatgataagctggagctgcaagagtgtctggagcacggcagaatagccaagttcagcaaagtgaggaccattaccaccaggtcaaactctataaagcagggcaaagaccagcatttccccgtgttcatgaacgagaaggaggacatcctgtggtgcactgaaatggaaagggtgtttggcttccccgtccactacacagacgtctccaacatgagccgcttggcgaggcagagactgctgggccgatcgtggagcgtgccggtcatccgccacctcttcgctccgctgaaggaatattttgcttgtgtgtctagcggcaatagtaacgctaacagccgcgggccgagcttcagcagcggcctggtgccgttaagcttgcgcggcagccatatgttcgaaaccgtgcctgtgtggaggagacagccagtccgggtgctgtccctttttgaagacatcaagaaagagctgacgagtttgggctttttggaaagtggttctgacccgggacaactgaagcatgtggttgatgtcacagacacagtgaggaaggatgtggaggagtggggacccttcgatcttgtgtacggcgccacacctcccctgggccacacctgtgaccgtcctcccagctggtacctgttccagttccaccggctcctgcagtacgcacggcccaagccaggcagccccaggcccttcttctggatgttcgtggacaatctggtgctgaacaaggaagacctggacgtcgcatctcgcttcctggagatggagccagtcaccatcccagatgtccacggcggatccttgcagaatgctgtccgcgtgtggagcaacatcccagccataaggagcagcaggcactgggctctggtttcggaagaagaattgtccctgctggcccagaacaagcagagctcgaagctcgcggccaagtggcccaccaagctggtgaagaactgctttctccccctaagagaatatttcaagtatttttcaggagggccgagctctggcgcacccccaccaagtggagggtctcctgccgggtccccaacatctactgaagaaggcaccagcgaatccgcaacgcccgagtcaggccctggtacctccacagaaccatctgaaggtagtgcgcctggttccccagctggaagccctacttccaccgaagaaggcacgtcaaccgaaccaagtgaaggatctgcccctgggaccagcactgaaccatctgagcggacactcctgacattcgaagatgtcgcagtgctgttcacccgggacgagtggaggaaactggctcccagccagcgcaatctgtatagagatgtgatgctggagaattacagaaatctcgtcagcctggggctgcccttcaccaagcctaaagtgatcagcctgctgcaacaaggcgaggatccttgggaaagcggcagcggcagcggatcaggcggatctggcagcggtggatctggttctggatccggcggctccggtagtggtggaagtggctctggggagacccccggtaccagcgagggcggccctggcacctccacagaaccatctgaaggtagtgcgcctggttccccagctggaagccctacttccaccgaagaaggcacgtcaaccgaaccaagtgaaggatctgcccctgggaccagcactgaaccatctgagccaaaaaagaagagaaaggtaatggacaagaagtacagcatcggcctggccatcggcaccaactctgtgggctgggccgtgatcaccgacgagtacaaggtgcccagcaagaaattcaaggtgctgggcaacaccgaccggcacagcatcaagaagaacctgatcggcgccctgctgttcgacagcggagaaacagccgaggccacccggctgaagagaaccgccagaagaagatacaccagacggaagaaccggatctgctatctgcaagagatcttcagcaacgagatggccaaggtggacgacagcttcttccacagactggaagagtccttcctggtggaagaggataagaagcacgagcggcaccccatcttcggcaacatcgtggacgaggtggcctaccacgagaagtaccccaccatctaccacctgagaaagaaactggtggacagcaccgacaaggccgacctgcggctgatctatctggccctggcccacatgatcaagttccggggccacttcctgatcgagggcgacctgaaccccgacaacagcgacgtggacaagctgttcatccagctggtgcagacctacaaccagctgttcgaggaaaaccccatcaacgccagcggcgtggacgccaaggccatcctgtctgccagactgagcaagagcagacggctggaaaatctgatcgcccagctgcccggcgagaagaagaatggcctgttcggcaacctgattgccctgagcctgggcctgacccccaacttcaagagcaacttcgacctggccgaggatgccaaactgcagctgagcaaggacacctacgacgacgacctggacaacctgctggcccagatcggcgaccagtacgccgacctgtttctggccgccaagaacctgtccgacgccatcctgctgagcgacatcctgagagtgaacaccgagatcaccaaggcccccctgagcgcctctatgatcaagagatacgacgagcaccaccaggacctgaccctgctgaaagctctcgtgcggcagcagctgcctgagaagtacaaagagattttcttcgaccagagcaagaacggctacgccggctacatcgatggcggagccagccaggaagagttctacaagttcatcaagcccatcctggaaaagatggacggcaccgaggaactgctcgtgaagctgaacagagaggacctgctgcggaagcagcggaccttcgacaacggcagcatcccccaccagatccacctgggagagctgcacgccattctgcggcggcaggaagatttttacccattcctgaaggacaaccgggaaaagatcgagaagatcctgaccttccgcatcccctactacgtgggccctctggccaggggaaacagcagattcgcctggatgaccagaaagagcgaggaaaccatcaccccctggaacttcgaggaagtggtggacaagggcgccagcgcccagagcttcatcgagcggatgaccaacttcgataagaacctgcccaacgagaaggtgctgcccaagcacagcctgctgtacgagtacttcaccgtgtacaacgagctgaccaaagtgaaatacgtgaccgagggaatgagaaagcccgccttcctgagcggcgagcagaaaaaagccatcgtggacctgctgttcaagaccaaccggaaagtgaccgtgaagcagctgaaagaggactacttcaagaaaatcgagtgcttcgactccgtggaaatctccggcgtggaagatcggttcaacgcctccctgggcacataccacgatctgctgaaaattatcaaggacaaggacttcctggacaatgaggaaaacgaggacattctggaagatatcgtgctgaccctgacactgtttgaggacagagagatgatcgaggaacggctgaaaacctatgcccacctgttcgacgacaaagtgatgaagcagctgaagcggcggagatacaccggctggggcaggctgagccggaagctgatcaacggcatccgggacaagcagtccggcaagacaatcctggatttcctgaagtccgacggcttcgccaacagaaacttcatgcagctgatccacgacgacagcctgacctttaaagaggacatccagaaagcccaggtgtccggccagggcgatagcctgcacgagcacattgccaatctggccggcagccccgccattaagaagggcatcctgcagacagtgaaggtggtggacgagctcgtgaaagtgatgggccggcacaagcccgagaacatcgtgatcgaaatggccagagagaaccagaccacccagaagggacagaagaacagccgcgagagaatgaagcggatcgaagagggcatcaaagagctgggcagccagatcctgaaagaacaccccgtggaaaacacccagctgcagaacgagaagctgtacctgtactacctgcagaatgggcgggatatgtacgtggaccaggaactggacatcaaccggctgtccgactacgatgtggacgctatcgtgcctcagagctttctgaaggacgactccatcgataacaaagtgctgactcggagcgacaagaaccggggcaagagcgacaacgtgccctccgaagaggtcgtgaagaagatgaagaactactggcgccagctgctgaatgccaagctgattacccagaggaagttcgacaatctgaccaaggccgagagaggcggcctgagcgaactggataaggccggcttcatcaagagacagctggtggaaacccggcagatcacaaagcacgtggcacagatcctggactcccggatgaacactaagtacgacgagaacgacaaactgatccgggaagtgaaagtgatcaccctgaagtccaagctggtgtccgatttccggaaggatttccagttttacaaagtgcgcgagatcaacaactaccaccacgcccacgacgcctacctgaacgccgtcgtgggaaccgccctgatcaaaaagtaccctaagctggaaagcgagttcgtgtacggcgactacaaggtgtacgacgtgcggaagatgatcgccaagagcgagcaggaaatcggcaaggctaccgccaagtacttcttctacagcaacatcatgaactttttcaagaccgagattaccctggccaacggcgagatccggaagcggcctctgatcgagacaaacggcgaaacaggcgagatcgtgtgggataagggccgggactttgccaccgtgcggaaagtgctgtctatgccccaagtgaatatcgtgaaaaagaccgaggtgcagacaggcggcttcagcaaagagtctatcctgcccaagaggaacagcgacaagctgatcgccagaaagaaggactgggaccctaagaagtacggcggcttcgacagccccaccgtggcctattctgtgctggtggtggccaaagtggaaaagggcaagtccaagaaactgaagagtgtgaaagagctgctggggatcaccatcatggaaagaagcagcttcgagaagaatcccatcgactttctggaagccaagggctacaaagaagtgaaaaaggacctgatcatcaagctgcctaagtactccctgttcgagctggaaaacggccggaagagaatgctggcctctgccggcgaactgcagaagggaaacgaactggccctgccctccaaatatgtgaacttcctgtacctggccagccactatgagaagctgaagggctcccccgaggataatgagcagaaacagctgtttgtggaacagcacaaacactacctggacgagatcatcgagcagatcagcgagttctccaagagagtgatcctggccgacgctaatctggacaaggtgctgagcgcctacaacaagcacagagacaagcctatcagagagcaggccgagaatatcatccacctgtttaccctgaccaatctgggagcccctgccgccttcaagtactttgacaccaccatcgaccggaagaggtacaccagcaccaaagaggtgctggacgccaccctgatccaccagagcatcaccggcctgtacgagacacggatcgacctgtctcagctgggaggcgacgcctatccctatgacgtgcccgattatgccagcctgggcagcggctcccccaagaaaaaacgcaaggtggaagatcctaagaaaaagcggaaagtggacggcctcgagtaatgagatcccaagcacgcagcaatgcagctcaaaacgcttagcctagccacacccccacgggaaacagcagtgattaacctttagcaataaacgaaagtttaactaagctatactaaccccagggttggtcaatttcgtgccagccacaccctggtactgcatgcacgcaatgctagctgcccctttcccgtcctgggcaccccgagtctcccccgaccccgggtcccaggtatgctcccacctccacctgccccactcaccacctctgctagttccagacacctccgagacgaggaaaaaaaaaaaaaaaaaaaaaaaaaaaaaaaaaaaaaaaaaaaaaaaaaaaaaaaaaaaaaaaaaaaaaaaaaaaaaaaaaaaaaaaaaaaaaaaaaaaaaaaaaaaaaaaaaaaaaaaaaaaaaaaaaaaaaaaaaaaaaaaaaaaaaaaaaaaaaaaaaaaaaaaaaaaaaaaaaaaaaaaaaaaaaaaaaaaaaaaaaaaaaaaaaaaaaaaaaaaaaaaaaaaaaaaaaaaaaaaaaaaaaaaaaaaaaaaaaaaaaaaaaaaaaaaaaaaaaaaaaaaaaaaaaaaaaaaaaaaaaaaaaaaaaaaaaaaaaaaaaaaaaaaaaaaaaaaaaaaaaaaaaaaaaaaaaaaaaaaaaaaaaaaaaaaaaaaaaaaaaaaaaaaaaaaaaaccgtcttcaagctttctagaaattcactggccgtcgttttacaacgtcgtgactgggaaaaccctggcgttacccaacttaatcgccttgcagcacatccccctttcgccagctggcgtaatagcgaagaggcccgcaccgatcgcccttcccaacagttgcgcagcctgaatggcgaatggcgcctgatgcggtattttctccttacgcatctgtgcggtatttcacaccgcatatggtgcactctcagtacaatctgctctgatgccgcatagttaagccagccccgacacccgccaacacccgctgacgcgccctgacgggcttgtctgctcccggcatccgcttacagacaagctgtgaccgtctccgggagctgcatgtgtcagaggttttcaccgtcatcaccgaaacgcgcgagacgaaagggcctcgtgatacgcctatttttataggttaatgtcatgataataatggtttcttagacgtcaggtggcacttttcggggaaatgtgcgcggaacccctatttgtttatttttctaaatacattcaaatatgtatccgctcatgagacaataaccctgataaatgcttcaataatattgaaaaaggaagagtatgagtattcaacatttccgtgtcgcccttattcccttttttgcggcattttgccttcctgtttttgctcacccagaaacgctggtgaaagtaaaagatgctgaagatcagttgggtgcacgagtgggttacatcgaactggatctcaacagcggtaagatccttgagagttttcgccccgaagaacgttttccaatgatgagcacttttaaagttctgctatgtggcgcggtattatcccgtattgacgccgggcaagagcaactcggtcgccgcatacactattctcagaatgacttggttgagtactcaccagtcacagaaaagcatcttacggatggcatgacagtaagagaattatgcagtgctgccataaccatgagtgataacactgcggccaacttacttctgacaacgatcggaggaccgaaggagctaaccgcttttttgcacaacatgggggatcatgtaactcgccttgatcgttgggaaccggagctgaatgaagccataccaaacgacgagcgtgacaccacgatgcctgtagcaatggcaacaacgttgcgcaaactattaactggcgaactacttactctagcttcccggcaacaattaatagactggatggaggcggataaagttgcaggaccacttctgcgctcggcccttccggctggctggtttattgctgataaatctggagccggtgagcgtgggtctcgcggtatcattgcagcactggggccagatggtaagccctcccgtatcgtagttatctacacgacggggagtcaggcaactatggatgaacgaaatagacagatcgctgagataggt

SEQ ID NO: 167 - DNA, 10020 bp, synthetic construct
  misc_feature 1..10020: note = V49 DNA
  source 1..10020: mol_type = other DNA
gcctcactgattaagcattggtaactgtcagaccaagtttactcatatatactttagattgatttaaaacttcatttttaatttaaaaggatctaggtgaagatcctttttgataatctcatgaccaaaatcccttaacgtgagttttcgttccactgagcgtcagaccccgtagaaaagatcaaaggatcttcttgagatcctttttttctgcgcgtaatctgctgcttgcaaacaaaaaaaccaccgctaccagcggtggtttgtttgccggatcaagagctaccaactctttttccgaaggtaactggcttcagcagagcgcagataccaaatactgttcttctagtgtagccgtagttaggccaccacttcaagaactctgtagcaccgcctacatacctcgctctgctaatcctgttaccagtggctgctgccagtggcgataagtcgtgtcttaccgggttggactcaagacgatagttaccggataaggcgcagcggtcgggctgaacggggggttcgtgcacacagcccagcttggagcgaacgacctacaccgaactgagatacctacagcgtgagctatgagaaagcgccacgcttcccgaagggagaaaggcggacaggtatccggtaagcggcagggtcggaacaggagagcgcacgagggagcttccagggggaaacgcctggtatctttatagtcctgtcgggtttcgccacctctgacttgagcgtcgatttttgtgatgctcgtcaggggggcggagcctatggaaaaacgccagcaacgcggcctttttacggttcctggccttttgctggccttttgctcacatgttctttcctgcgttatcccctgattctgtggataaccgtattaccgcctttgagtgagctgataccgctcgccgcagccgaacgaccgagcgcagcgagtcagtgagcgaggaagcggaagagcgcccaatacgcaaaccgcctctccccgcgcgttggccgattcattaatgcagctggcacgacaggtttcccgactggaaagcgggcagtgagcgcaacgcaattaatgtgagttagctcactcattaggcaccccaggctttacactttatgcttccggctcgtatgttgtgtggaattgtgagcggataacaatttcacacaggaaacagctatgaccatgattacgcctctagaaagctttaatacgactcactataaggactcactatttgttttcgcgcccagttgcaaaaagtgtcgacatttgcttctgacacaactgtgttcactagcaacctcaaacagacaccgccaccatgcctgctgctaagagagtgaaactggatggatccaaccatgaccaggaatttgaccccccaaaggtttacccacctgtgccagctgagaagaggaagcccatccgcgtgctgtctctctttgatgggattgctacagggctcctggtgctgaaggacctgggcatccaagtggaccgctacattgcctccgaggtgtgtgaggactccatcacggtgggcatggtgcggcaccagggaaagatcatgtacgtcggggacgtccgcagcgtcacacagaagcatatccaggagtggggcccattcgacctggtgattggaggcagtccctgcaatgacctctccattgtcaaccctgcccgcaagggactttatgagggtactggccgcctcttctttgagttctaccgcctcctgcatgatgcgcggcccaaggagggagatgatcgccccttcttctggctctttgagaatgtggtggccatgggcgttagtgacaagagggacatctcgcgatttcttgagtctaaccccgtgatgattgacgccaaagaagtgtctgctgcacacagggcccgttacttctggggtaaccttcctggcatgaacaggcctttggcatccactgtgaatgataagctggagctgcaagagtgtctggagcacggcagaatagccaagttcagcaaagtgaggaccattaccaccaggtcaaactctataaagcagggcaaagaccagcatttccccgtgttcatgaacgagaaggaggacatcctgtggtgcactgaaatggaaagggtgtttggcttccccgtccactacacagacgtctccaacatgagccgcttggcgaggcagagactgctgggccgatcgtggagcgtgccggtcatccgccacctcttcgctccgctgaaggaatattttgcttgtgtgtctagcggcaatagtaacgctaacagccgcgggccgagcttcagcagcggcctggtgccgttaagcttgcgcggcagccatatgttcgaaaccgtgcctgtgtggaggagacagccagtccgggtgctgtccctttttgaagacatcaagaaagagctgacgagtttgggctttttggaaagtggttctgacccgggacaactgaagcatgtggttgatgtcacagacacagtgaggaaggatgtggaggagtggggacccttcgatcttgtgtacggcgccacacctcccctgggccacacctgtgaccgtcctcccagctggtacctgttccagttccaccggctcctgcagtacgcacggcccaagccaggcagccccaggcccttcttctggatgttcgtggacaatctggtgctgaacaaggaagacctggacgtcgcatctcgcttcctggagatggagccagtcaccatcccagatgtccacggcggatccttgcagaatgctgtccgcgtgtggagcaacatcccagccataaggagcagcaggcactgggctctggtttcggaagaagaattgtccctgctggcccagaacaagcagagctcgaagctcgcggccaagtggcccaccaagctggtgaagaactgctttctccccctaagagaatatttcaagtatttttcaggagggccgagctctggcgcacccccaccaagtggagggtctcctgccgggtccccaacatctactgaagaaggcaccagcgaatccgcaacgcccgagtcaggccctggtacctccacagaaccatctgaaggtagtgcgcctggttccccagctggaagccctacttccaccgaagaaggcacgtcaaccgaaccaagtgaaggatctgcccctgggaccagcactgaaccatctgagcggacactcgttaccttcgaagatgttgccgtgtacttcagccaagaagagtggcggctgctggatgacgcccagagactgctgtatcggaatgttatgctcgaaaacttcaccctgctggcttccctgggactcgccagctctaagacccacgagattacccagctggaatcctgggaagaacccttcatgagcggcagcggcagcggatcaggcggatctggcagcggtggatctggttctggatccggcggctccggtagtggtggaagtggctctggggagacccccggtaccagcgagggcggccctggcacctccacagaaccatctgaaggtagtgcgcctggttccccagctggaagccctacttccaccgaagaaggcacgtcaaccgaaccaagtgaaggatctgcccctgggaccagcactgaaccatctgagccaaaaaagaagagaaaggtaatggacaagaagtacagcatcggcctggccatcggcaccaactctgtgggctgggccgtgatcaccgacgagtacaaggtgcccagcaagaaattcaaggtgctgggcaacaccgaccggcacagcatcaagaagaacctgatcggcgccctgctgttcgacagcggagaaacagccgaggccacccggctgaagagaaccgccagaagaagatacaccagacggaagaaccggatctgctatctgcaagagatcttcagcaacgagatggccaaggtggacgacagcttcttccacagactggaagagtccttcctggtggaagaggataagaagcacgagcggcaccccatcttcggcaacatcgtggacgaggtggcctaccacgagaagtaccccaccatctaccacctgagaaagaaactggtggacagcaccgacaaggccgacctgcggctgatctatctggccctggcccacatgatcaagttccggggccacttcctgatcgagggcgacctgaaccccgacaacagcgacgtggacaagctgttcatccagctggtgcagacctacaaccagctgttcgaggaaaaccccatcaacgccagcggcgtggacgccaaggccatcctgtctgccagactgagcaagagcagacggctggaaaatctgatcgcccagctgcccggcgagaagaagaatggcctgttcggcaacctgattgccctgagcctgggcctgacccccaacttcaagagcaacttcgacctggccgaggatgccaaactgcagctgagcaaggacacctacgacgacgacctggacaacctgctggcccagatcggcgaccagtacgccgacctgtttctggccgccaagaacctgtccgacgccatcctgctgagcgacatcctgagagtgaacaccgagatcaccaaggcccccctgagcgcctctatgatcaagagatacgacgagcaccaccaggacctgaccctgctgaaagctctcgtgcggcagcagctgcctgagaagtacaaagagattttcttcgaccagagcaagaacggctacgccggctacatcgatggcggagccagccaggaagagttctacaagttcatcaagcccatcctggaaaagatggacggcaccgaggaactgctcgtgaagctgaacagagaggacctgctgcggaagcagcggaccttcgacaacggcagcatcccccaccagatccacctgggagagctgcacgccattctgcggcggcaggaagatttttacccattcctgaaggacaaccgggaaaagatcgagaagatcctgaccttccgcatcccctactacgtgggccctctggccaggggaaacagcagattcgcctggatgaccagaaagagcgaggaaaccatcaccccctggaacttcgaggaagtggtggacaagggcgccagcgcccagagcttcatcgagcggatgaccaacttcgataagaacctgcccaacgagaaggtgctgcccaagcacagcctgctgtacgagtacttcaccgtgtacaacgagctgaccaaagtgaaatacgtgaccgagggaatgagaaagcccgccttcctgagcggcgagcagaaaaaagccatcgtggacctgctgttcaagaccaaccggaaagtgaccgtgaagcagctgaaagaggactacttcaagaaaatcgagtgcttcgactccgtggaaatctccggcgtggaagatcggttcaacgcctccctgggcacataccacgatctgctgaaaattatcaaggacaaggacttcctggacaatgaggaaaacgaggacattctggaagatatcgtgctgaccctgacactgtttgaggacagagagatgatcgaggaacggctgaaaacctatgcccacctgttcgacgacaaagtgatgaagcagctgaagcggcggagatacaccggctggggcaggctgagccggaagctgatcaacggcatccgggacaagcagtccggcaagacaatcctggatttcctgaagtccgacggcttcgccaacagaaacttcatgcagctgatccacgacgacagcctgacctttaaagaggacatccagaaagcccaggtgtccggccagggcgatagcctgcacgagcacattgccaatctggccggcagccccgccattaagaagggcatcctgcagacagtgaaggtggtggacgagctcgtgaaagtgatgggccggcacaagcccgagaacatcgtgatcgaaatggccagagagaaccagaccacccagaagggacagaagaacagccgcgagagaatgaagcggatcgaagagggcatcaaagagctgggcagccagatcctgaaagaacaccccgtggaaaacacccagctgcagaacgagaagctgtacctgtactacctgcagaatgggcgggatatgtacgtggaccaggaactggacatcaaccggctgtccgactacgatgtggacgctatcgtgcctcagagctttctgaaggacgactccatcgataacaaagtgctgactcggagcgacaagaaccggggcaagagcgacaacgtgccctccgaagaggtcgtgaagaagatgaagaactactggcgccagctgctgaatgccaagctgattacccagaggaagttcgacaatctgaccaaggccgagagaggcggcctgagcgaactggataaggccggcttcatcaagagacagctggtggaaacccggcagatcacaaagcacgtggcacagatcctggactcccggatgaacactaagtacgacgagaacgacaaactgatccgggaagtgaaagtgatcaccctgaagtccaagctggtgtccgatttccggaaggatttccagttttacaaagtgcgcgagatcaacaactaccaccacgcccacgacgcctacctgaacgccgtcgtgggaaccgccctgatcaaaaagtaccctaagctggaaagcgagttcgtgtacggcgactacaaggtgtacgacgtgcggaagatgatcgccaagagcgagcaggaaatcggcaaggctaccgccaagtacttcttctacagcaacatcatgaactttttcaagaccgagattaccctggccaacggcgagatccggaagcggcctctgatcgagacaaacggcgaaacaggcgagatcgtgtgggataagggccgggactttgccaccgtgcggaaagtgctgtctatgccccaagtgaatatcgtgaaaaagaccgaggtgcagacaggcggcttcagcaaagagtctatcctgcccaagaggaacagcgacaagctgatcgccagaaagaaggactgggaccctaagaagtacggcggcttcgacagccccaccgtggcctattctgtgctggtggtggccaaagtggaaaagggcaagtccaagaaactgaagagtgtgaaagagctgctggggatcaccatcatggaaagaagcagcttcgagaagaatcccatcgactttctggaagccaagggctacaaagaagtgaaaaaggacctgatcatcaagctgcctaagtactccctgttcgagctggaaaacggccggaagagaatgctggcctctgccggcgaactgcagaagggaaacgaactggccctgccctccaaatatgtgaacttcctgtacctggccagccactatgagaagctgaagggctcccccgaggataatgagcagaaacagctgtttgtggaacagcacaaacactacctggacgagatcatcgagcagatcagcgagttctccaagagagtgatcctggccgacgctaatctggacaaggtgctgagcgcctacaacaagcacagagacaagcctatcagagagcaggccgagaatatcatccacctgtttaccctgaccaatctgggagcccctgccgccttcaagtactttgacaccaccatcgaccggaagaggtacaccagcaccaaagaggtgctggacgccaccctgatccaccagagcatcaccggcctgtacgagacacggatcgacctgtctcagctgggaggcgacgcctatccctatgacgtgcccgattatgccagcctgggcagcggctcccccaagaaaaaacgcaaggtggaagatcctaagaaaaagcggaaagtggacggcctcgagtaatgagatcccaagcacgcagcaatgcagctcaaaacgcttagcctagccacacccccacgggaaacagcagtgattaacctttagcaataaacgaaagtttaactaagctatactaaccccagggttggtcaatttcgtgccagccacaccctggtactgcatgcacgcaatgctagctgcccctttcccgtcctgggcaccccgagtctcccccgaccccgggtcccaggtatgctcccacctccacctgccccactcaccacctctgctagttccagacacctccgagacgaggaaaaaaaaaaaaaaaaaaaaaaaaaaaaaaaaaaaaaaaaaaaaaaaaaaaaaaaaaaaaaaaaaaaaaaaaaaaaaaaaaaaaaaaaaaaaaaaaaaaaaaaaaaaaaaaaaaaaaaaaaaaaaaaaaaaaaaaaaaaaaaaaaaaaaaaaaaaaaaaaaaaaaaaaaaaaaaaaaaaaaaaaaaaaaaaaaaaaaaaaaaaaaaaaaaaaaaaaaaaaaaaaaaaaaaaaaaaaaaaaaaaaaaaaaaaaaaaaaaaaaaaaaaaaaaaaaaaaaaaaaaaaaaaaaaaaaaaaaaaaaaaaaaaaaaaaaaaaaaaaaaaaaaaaaaaaaaaaaaaaaaaaaaaaaaaaaaaaaaaaaaaaaaaaaaaaaaaaaaaaaaaaaaaaaaaaaaccgtcttcaagctttctagaaattcactggccgtcgttttacaacgtcgtgactgggaaaaccctggcgttacccaacttaatcgccttgcagcacatccccctttcgccagctggcgtaatagcgaagaggcccgcaccgatcgcccttcccaacagttgcgcagcctgaatggcgaatggcgcctgatgcggtattttctccttacgcatctgtgcggtatttcacaccgcatatggtgcactctcagtacaatctgctctgatgccgcatagttaagccagccccgacacccgccaacacccgctgacgcgccctgacgggcttgtctgctcccggcatccgcttacagacaagctgtgaccgtctccgggagctgcatgtgtcagaggttttcaccgtcatcaccgaaacgcgcgagacgaaagggcctcgtgatacgcctatttttataggttaatgtcatgataataatggtttcttagacgtcaggtggcacttttcggggaaatgtgcgcggaacccctatttgtttatttttctaaatacattcaaatatgtatccgctcatgagacaataaccctgataaatgcttcaataatattgaaaaaggaagagtatgagtattcaacatttccgtgtcgcccttattcccttttttgcggcattttgccttcctgtttttgctcacccagaaacgctggtgaaagtaaaagatgctgaagatcagttgggtgcacgagtgggttacatcgaactggatctcaacagcggtaagatccttgagagttttcgccccgaagaacgttttccaatgatgagcacttttaaagttctgctatgtggcgcggtattatcccgtattgacgccgggcaagagcaactcggtcgccgcatacactattctcagaatgacttggttgagtactcaccagtcacagaaaagcatcttacggatggcatgacagtaagagaattatgcagtgctgccataaccatgagtgataacactgcggccaacttacttctgacaacgatcggaggaccgaaggagctaaccgcttttttgcacaacatgggggatcatgtaactcgccttgatcgttgggaaccggagctgaatgaagccataccaaacgacgagcgtgacaccacgatgcctgtagcaatggcaacaacgttgcgcaaactattaactggcgaactacttactctagcttcccggcaacaattaatagactggatggaggcggataaagttgcaggaccacttctgcgctcggcccttccggctggctggtttattgctgataaatctggagccggtgagcgtgggtctcgcggtatcattgcagcactggggccagatggtaagccctcccgtatcgtagttatctacacgacggggagtcaggcaactatggatgaacgaaatagacagatcgctgagataggt

SEQ ID NO: 168 - DNA, 10061 bp, synthetic construct
  misc_feature 1..10061: note = V50 DNA
  source 1..10061: mol_type = other DNA
ccttaacgtgagttttcgttccactgagcgtcagaccccgtagaaaagatcaaaggatcttcttgagatcctttttttctgcgcgtaatctgctgcttgcaaacaaaaaaaccaccgctaccagcggtggtttgtttgccggatcaagagctaccaactctttttccgaaggtaactggcttcagcagagcgcagataccaaatactgttcttctagtgtagccgtagttaggccaccacttcaagaactctgtagcaccgcctacatacctcgctctgctaatcctgttaccagtggctgctgccagtggcgataagtcgtgtcttaccgggttggactcaagacgatagttaccggataaggcgcagcggtcgggctgaacggggggttcgtgcacacagcccagcttggagcgaacgacctacaccgaactgagatacctacagcgtgagctatgagaaagcgccacgcttcccgaagggagaaaggcggacaggtatccggtaagcggcagggtcggaacaggagagcgcacgagggagcttccagggggaaacgcctggtatctttatagtcctgtcgggtttcgccacctctgacttgagcgtcgatttttgtgatgctcgtcaggggggcggagcctatggaaaaacgccagcaacgcggcctttttacggttcctggccttttgctggccttttgctcacatgttctttcctgcgttatcccctgattctgtggataaccgtattaccgcctttgagtgagctgataccgctcgccgcagccgaacgaccgagcgcagcgagtcagtgagcgaggaagcggaagagcgcccaatacgcaaaccgcctctccccgcgcgttggccgattcattaatgcagctggcacgacaggtttcccgactggaaagcgggcagtgagcgcaacgcaattaatgtgagttagctcactcattaggcaccccaggctttacactttatgcttccggctcgtatgttgtgtggaattgtgagcggataacaatttcacacaggaaacagctatgaccatgattacgcctctagaaagctttaatacgactcactataaggactcactatttgttttcgcgcccagttgcaaaaagtgtcgacatttgcttctgacacaactgtgttcactagcaacctcaaacagacaccgccaccatggtccctgctgctaagagagtgaaactggatggatccgacaagaagtacagcatcggcctggccatcggcaccaactctgtgggctgggccgtgatcaccgacgagtacaaggtgcccagcaagaaattcaaggtgctgggcaacaccgaccggcacagcatcaagaagaacctgatcggcgccctgctgttcgacagcggagaaacagccgaggccacccggctgaagagaaccgccagaagaagatacaccagacggaagaaccggatctgctatctgcaagagatcttcagcaacgagatggccaaggtggacgacagcttcttccacagactggaagagtccttcctggtggaagaggataagaagcacgagcggcaccccatcttcggcaacatcgtggacgaggtggcctaccacgagaagtaccccaccatctaccacctgagaaagaaactggtggacagcaccgacaaggccgacctgcggctgatctatctggccctggcccacatgatcaagttccggggccacttcctgatcgagggcgacctgaaccccgacaacagcgacgtggacaagctgttcatccagctggtgcagacctacaaccagctgttcgaggaaaaccccatcaacgccagcggcgtggacgccaaggccatcctgtctgccagactgagcaagagcagacggctggaaaatctgatcgcccagctgcccggcgagaagaagaatggcctgttcggcaacctgattgccctgagcctgggcctgacccccaacttcaagagcaacttcgacctggccgaggatgccaaactgcagctgagcaaggacacctacgacgacgacctggacaacctgctggcccagatcggcgaccagtacgccgacctgtttctggccgccaagaacctgtccgacgccatcctgctgagcgacatcctgagagtgaacaccgagatcaccaaggcccccctgagcgcctctatgatcaagagatacgacgagcaccaccaggacctgaccctgctgaaagctctcgtgcggcagcagctgcctgagaagtacaaagagattttcttcgaccagagcaagaacggctacgccggctacatcgatggcggagccagccaggaagagttctacaagttcatcaagcccatcctggaaaagatggacggcaccgaggaactgctcgtgaagctgaacagagaggacctgctgcggaagcagcggaccttcgacaacggcagcatcccccaccagatccacctgggagagctgcacgccattctgcggcggcaggaagatttttacccattcctgaaggacaaccgggaaaagatcgagaagatcctgaccttccgcatcccctactacgtgggccctctggccaggggaaacagcagattcgcctggatgaccagaaagagcgaggaaaccatcaccccctggaacttcgaggaagtggtggacaagggcgccagcgcccagagcttcatcgagcggatgaccaacttcgataagaacctgcccaacgagaaggtgctgcccaagcacagcctgctgtacgagtacttcaccgtgtacaacgagctgaccaaagtgaaatacgtgaccgagggaatgagaaagcccgccttcctgagcggcgagcagaaaaaagccatcgtggacctgctgttcaagaccaaccggaaagtgaccgtgaagcagctgaaagaggactacttcaagaaaatcgagtgcttcgactccgtggaaatctccggcgtggaagatcggttcaacgcctccctgggcacataccacgatctgctgaaaattatcaaggacaaggacttcctggacaatgaggaaaacgaggacattctggaagatatcgtgctgaccctgacactgtttgaggacagagagatgatcgaggaacggctgaaaacctatgcccacctgttcgacgacaaagtgatgaagcagctgaagcggcggagatacaccggctggggcaggctgagccggaagctgatcaacggcatccgggacaagcagtccggcaagacaatcctggatttcctgaagtccgacggcttcgccaacagaaacttcatgcagctgatccacgacgacagcctgacctttaaagaggacatccagaaagcccaggtgtccggccagggcgatagcctgcacgagcacattgccaatctggccggcagccccgccattaagaagggcatcctgcagacagtgaaggtggtggacgagctcgtgaaagtgatgggccggcacaagcccgagaacatcgtgatcgaaatggccagagagaaccagaccacccagaagggacagaagaacagccgcgagagaatgaagcggatcgaagagggcatcaaagagctgggcagccagatcctgaaagaacaccccgtggaaaacacccagctgcagaacgagaagctgtacctgtactacctgcagaatgggcgggatatgtacgtggaccaggaactggacatcaaccggctgtccgactacgatgtggacgctatcgtgcctcagagctttctgaaggacgactccatcgataacaaagtgctgactcggagcgacaagaaccggggcaagagcgacaacgtgccctccgaagaggtcgtgaagaagatgaagaactactggcgccagctgctgaatgccaagctgattacccagaggaagttcgacaatctgaccaaggccgagagaggcggcctgagcgaactggataaggccggcttcatcaagagacagctggtggaaacccggcagatcacaaagcacgtggcacagatcctggactcccggatgaacactaagtacgacgagaacgacaaactgatccgggaagtgaaagtgatcaccctgaagtccaagctggtgtccgatttccggaaggatttccagttttacaaagtgcgcgagatcaacaactaccaccacgcccacgacgcctacctgaacgccgtcgtgggaaccgccctgatcaaaaagtaccctaagctggaaagcgagttcgtgtacggcgactacaaggtgtacgacgtgcggaagatgatcgccaagagcgagcaggaaatcggcaaggctaccgccaagtacttcttctacagcaacatcatgaactttttcaagaccgagattaccctggccaacggcgagatccggaagcggcctctgatcgagacaaacggcgaaacaggcgagatcgtgtgggataagggccgggactttgccaccgtgcggaaagtgctgtctatgccccaagtgaatatcgtgaaaaagaccgaggtgcagacaggcggcttcagcaaagagtctatcctgcccaagaggaacagcgacaagctgatcgccagaaagaaggactgggaccctaagaagtacggcggcttcgacagccccaccgtggcctattctgtgctggtggtggccaaagtggaaaagggcaagtccaagaaactgaagagtgtgaaagagctgctggggatcaccatcatggaaagaagcagcttcgagaagaatcccatcgactttctggaagccaagggctacaaagaagtgaaaaaggacctgatcatcaagctgcctaagtactccctgttcgagctggaaaacggccggaagagaatgctggcctctgccggcgaactgcagaagggaaacgaactggccctgccctccaaatatgtgaacttcctgtacctggccagccactatgagaagctgaagggctcccccgaggataatgagcagaaacagctgtttgtggaacagcacaaacactacctggacgagatcatcgagcagatcagcgagttctccaagagagtgatcctggccgacgctaatctggacaaggtgctgagcgcctacaacaagcacagagacaagcctatcagagagcaggccgagaatatcatccacctgtttaccctgaccaatctgggagcccctgccgccttcaagtactttgacaccaccatcgaccggaagaggtacaccagcaccaaagaggtgctggacgccaccctgatccaccagagcatcaccggcctgtacgagacacggatcgacctgtctcagctgggaggcgacgcctatccctatgacgtgcccgattatgccagcctgggcagcggctcccccaagaaaaaacgcaaggtggaagatcctaagaaaaagcggaaagtggacggcggagggccgagctctggcgcacccccaccaagtggagggtctcctgccgggtccccaacatctactgaagaaggcaccagcgaatccgcaacgcccgagtcaggccctggtacctccacagaaccatctgaaggtagtgcgcctggttccccagctggaagccctacttccaccgaagaaggcacgtcaaccgaaccaagtgaaggatctgcccctgggaccagcactgaaccatctgagatgggccctatggagatatacaagacagtgtctgcatggaagagacagccagtgcgggtactgagcctcttcagaaacatcgacaaggtactaaagagtttgggcttcttggaaagcggttctggttctgggggaggaacgctgaagtacgtggaagatgtcacaaatgtcgtgaggagagacgtggagaaatggggcccctttgacctggtgtacggctcgacgcagcccctaggcagctcttgtgatcgctgtcccggctggtacatgttccagttccaccggatcctgcagtatgcgctgcctcgccaggagagtcagcggcccttcttctggatattcatggacaatctgctgctgactgaggatgaccaagagacaactacccgcttccttcagacagaggctgtgaccctccaggatgtccgtggcagagactaccagaatgctatgcgggtgtggagcaacattccagggctgaagagcaagcatgcgcccctgaccccaaaggaagaagagtatctgcaagcccaagtcagaagcaggagcaagctggacgccccgaaagttgacctcctggtgaagaactgccttctcccgctgagagagtacttcaagtatttttctcaaaactcacttcctctttctagcggcaatagtaacgctaacagccgcgggccgagcttcagcagcggcctggtgccgttaagcttgcgcggcagccatatgaaccatgaccaggaatttgaccccccaaaggtttacccacctgtgccagctgagaagaggaagcccatccgcgtgctgtctctctttgatgggattgctacagggctcctggtgctgaaggacctgggcatccaagtggaccgctacattgcctccgaggtgtgtgaggactccatcacggtgggcatggtgcggcaccagggaaagatcatgtacgtcggggacgtccgcagcgtcacacagaagcatatccaggagtggggcccattcgacctggtgattggaggcagtccctgcaatgacctctccattgtcaaccctgcccgcaagggactttatgagggtactggccgcctcttctttgagttctaccgcctcctgcatgatgcgcggcccaaggagggagatgatcgccccttcttctggctctttgagaatgtggtggccatgggcgttagtgacaagagggacatctcgcgatttcttgagtctaaccccgtgatgattgacgccaaagaagtgtctgctgcacacagggcccgttacttctggggtaaccttcctggcatgaacaggcctttggcatccactgtgaatgataagctggagctgcaagagtgtctggagcacggcagaatagccaagttcagcaaagtgaggaccattaccaccaggtcaaactctataaagcagggcaaagaccagcatttccccgtcttcatgaacgagaaggaggacatcctgtggtgcactgaaatggaaagggtgtttggcttccccgtccactacacagacgtctccaacatgagccgcttggcgaggcagagactgctgggccgatcgtggagcgtgccggtcatccgccacctcttcgctccgctgaaggaatattttgcttgtgtggacggcagcggcagcgagacccccggtaccagcgagagcgccacccccgagagccggacactggtgaccttcaaggatgtatttgtggacttcaccagggaggagtggaagctgctggacactgctcagcagatcgtgtacagaaatgtgatgctggagaactataagaacctggtttccttgggttatcagcttactaagccagatgtgatcctccggttggagaagggagaagagcccggcagcggcagcgagacccccggtaccagcgagagcgccacccccgagagccggacactggtgaccttcaaggatgtatttgtggacttcaccagggaggagtggaagctgctggacactgctcagcagatcgtgtacagaaatgtgatgctggagaactataagaacctggtttccttgggttatcagcttactaagccagatgtgatcctccggttggagaagggagaagagccctgagatcccaagcacgcagcaatgcagctcaaaacgcttagcctagccacacccccacgggaaacagcagtgattaacctttagcaataaacgaaagtttaactaagctatactaaccccagggttggtcaatttcgtgccagccacaccctggtactgcatgcacgcaatgctagctgcccctttcccgtcctgggcaccccgagtctcccccgaccccgggtcccaggtatgctcccacctccacctgccccactcaccacctctgctagttccagacacctccgaagatggaaaaaaaaaaaaaaaaaaaaaaaaaaaaaaaaaaaaaaaaaaaaaaaaaaaaaaaaaaaaaaaaaaaaaaaaaaaaaaaaaaaaaaaaaaaaaaaaaaaaaaaaaaaaaaaaaaaaaaaaaaaaaaaaaaaaaaaaaaaaaaaaaaaaaaaaaaaaaaaaaaaaaaaaaaaaaaaaaaaaaaaaaaaaaaaaaaaaaaaaaaaaaaaaaaaaaaaaaaaaaaaaaaaaaaaaaaaaaaaaaaaaaaaaaaaaaaaaaaaaaaaaaaaaaaaaaaaaaaaaaaaaaaaaaaaaaaaaaaaaaaaaaaaaaaaaaaaaaaaaaaaaaaaaaaaaaaaaaaaaaaaaaaaaaaaaaaaaaaaaaaaaaaaaaaaaaaaaaaaaaaaaaaaaaaaaaaccgtcttcaagctttctagaaattcactggccgtcgttttacaacgtcgtgactgggaaaaccctggcgttacccaacttaatcgccttgcagcacatccccctttcgccagctggcgtaatagcgaagaggcccgcaccgatcgcccttcccaacagttgcgcagcctgaatggcgaatggcgcctgatgcggtattttctccttacgcatctgtgcggtatttcacaccgcatatggtgcactctcagtacaatctgctctgatgccgcatagttaagccagccccgacacccgccaacacccgctgacgcgccctgacgggcttgtctgctcccggcatccgcttacagacaagctgtgaccgtctccgggagctgcatgtgtcagaggttttcaccgtcatcaccgaaacgcgcgagacgaaagggcctcgtgatacgcctatttttataggttaatgtcatgataataatggtttcttagacgtcaggtggcacttttcggggaaatgtgcgcggaacccctatttgtttatttttctaaatacattcaaatatgtatccgctcatgagacaataaccctgataaatgcttcaataatattgaaaaaggaagagtatgagtattcaacatttccgtgtcgcccttattcccttttttgcggcattttgccttcctgtttttgctcacccagaaacgctggtgaaagtaaaagatgctgaagatcagttgggtgcacgagtgggttacatcgaactggatctcaacagcggtaagatccttgagagttttcgccccgaagaacgttttccaatgatgagcacttttaaagttctgctatgtggcgcggtattatcccgtattgacgccgggcaagagcaactcggtcgccgcatacactattctcagaatgacttggttgagtactcaccagtcacagaaaagcatcttacggatggcatgacagtaagagaattatgcagtgctgccataaccatgagtgataacactgcggccaacttacttctgacaacgatcggaggaccgaaggagctaaccgcttttttgcacaacatgggggatcatgtaactcgccttgatcgttgggaaccggagctgaatgaagccataccaaacgacgagcgtgacaccacgatgcctgtagcaatggcaacaacgttgcgcaaactattaactggcgaactacttactctagcttcccggcaacaattaatagactggatggaggcggataaagttgcaggaccacttctgcgctcggcccttccggctggctggtttattgctgataaatctggagccggtgagcgtgggtcacgcggtatcattgcagcactggggccagatggtaagccctcccgtatcgtagttatctacacgacggggagtcaggcaactatggatgaacgaaatagacagatcgctgagataggtgcctcactgattaagcattggtaactgtcagaccaagtttactcatatatactttagattgatttaaaacttcatttttaatttaaaaggatctaggtgaagatcctttttgataatctcatgaccaaaatc

SEQ ID NO: 169 - DNA, 10298 bp, synthetic construct
  misc_feature 1..10298: note = V51 DNA
  source 1..10298: mol_type = other DNA
ccttaacgtgagttttcgttccactgagcgtcagaccccgtagaaaagatcaaaggatcttcttgagatcctttttttctgcgcgtaatctgctgcttgcaaacaaaaaaaccaccgctaccagcggtggtttgtttgccggatcaagagctaccaactctttttccgaaggtaactggcttcagcagagcgcagataccaaatactgttcttctagtgtagccgtagttaggccaccacttcaagaactctgtagcaccgcctacatacctcgctctgctaatcctgttaccagtggctgctgccagtggcgataagtcgtgtcttaccgggttggactcaagacgatagttaccggataaggcgcagcggtcgggctgaacggggggttcgtgcacacagcccagcttggagcgaacgacctacaccgaactgagatacctacagcgtgagctatgagaaagcgccacgcttcccgaagggagaaaggcggacaggtatccggtaagcggcagggtcggaacaggagagcgcacgagggagcttccagggggaaacgcctggtatctttatagtcctgtcgggtttcgccacctctgacttgagcgtcgatttttgtgatgctcgtcaggggggcggagcctatggaaaaacgccagcaacgcggcctttttacggttcctggccttttgctggccttttgctcacatgttctttcctgcgttatcccctgattctgtggataaccgtattaccgcctttgagtgagctgataccgctcgccgcagccgaacgaccgagcgcagcgagtcagtgagcgaggaagcggaagagcgcccaatacgcaaaccgcctctccccgcgcgttggccgattcattaatgcagctggcacgacaggtttcccgactggaaagcgggcagtgagcgcaacgcaattaatgtgagttagctcactcattaggcaccccaggctttacactttatgcttccggctcgtatgttgtgtggaattgtgagcggataacaatttcacacaggaaacagctatgaccatgattacgcctctagaaagctttaatacgactcactataaggactcactatttgttttcgcgcccagttgcaaaaagtgtcgacatttgcttctgacacaactgtgttcactagcaacctcaaacagacaccgccaccatggtccctgctgctaagagagtgaaactggatggatccgacaagaagtacagcatcggcctggccatcggcaccaactctgtgggctgggccgtgatcaccgacgagtacaaggtgcccagcaagaaattcaaggtgctgggcaacaccgaccggcacagcatcaagaagaacctgatcggcgccctgctgttcgacagcggagaaacagccgaggccacccggctgaagagaaccgccagaagaagatacaccagacggaagaaccggatctgctatctgcaagagatcttcagcaacgagatggccaaggtggacgacagcttcttccacagactggaagagtccttcctggtggaagaggataagaagcacgagcggcaccccatcttcggcaacatcgtggacgaggtggcctaccacgagaagtaccccaccatctaccacctgagaaagaaactggtggacagcaccgacaaggccgacctgcggctgatctatctggccctggcccacatgatcaagttccggggccacttcctgatcgagggcgacctgaaccccgacaacagcgacgtggacaagctgttcatccagctggtgcagacctacaaccagctgttcgaggaaaaccccatcaacgccagcggcgtggacgccaaggccatcctgtctgccagactgagcaagagcagacggctggaaaatctgatcgcccagctgcccggcgagaagaagaatggcctgttcggcaacctgattgccctgagcctgggcctgacccccaacttcaagagcaacttcgacctggccgaggatgccaaactgcagctgagcaaggacacctacgacgacgacctggacaacctgctggcccagatcggcgaccagtacgccgacctgtttctggccgccaagaacctgtccgacgccatcctgctgagcgacatcctgagagtgaacaccgagatcaccaaggcccccctgagcgcctctatgatcaagagatacgacgagcaccaccaggacctgaccctgctgaaagctctcgtgcggcagcagctgcctgagaagtacaaagagattttcttcgaccagagcaagaacggctacgccggctacatcgatggcggagccagccaggaagagttctacaagttcatcaagcccatcctggaaaagatggacggcaccgaggaactgctcgtgaagctgaacagagaggacctgctgcggaagcagcggaccttcgacaacggcagcatcccccaccagatccacctgggagagctgcacgccattctgcggcggcaggaagatttttacccattcctgaaggacaaccgggaaaagatcgagaagatcctgaccttccgcatcccctactacgtgggccctctggccaggggaaacagcagattcgcctggatgaccagaaagagcgaggaaaccatcaccccctggaacttcgaggaagtggtggacaagggcgccagcgcccagagcttcatcgagcggatgaccaacttcgataagaacctgcccaacgagaaggtgctgcccaagcacagcctgctgtacgagtacttcaccgtgtacaacgagctgaccaaagtgaaatacgtgaccgagggaatgagaaagcccgccttcctgagcggcgagcagaaaaaagccatcgtggacctgctgttcaagaccaaccggaaagtgaccgtgaagcagctgaaagaggactacttcaagaaaatcgagtgcttcgactccgtggaaatctccggcgtggaagatcggttcaacgcctccctgggcacataccacgatctgctgaaaattatcaaggacaaggacttcctggacaatgaggaaaacgaggacattctggaagatatcgtgctgaccctgacactgtttgaggacagagagatgatcgaggaacggctgaaaacctatgcccacctgttcgacgacaaagtgatgaagcagctgaagcggcggagatacaccggctggggcaggctgagccggaagctgatcaacggcatccgggacaagcagtccggcaagacaatcctggatttcctgaagtccgacggcttcgccaacagaaacttcatgcagctgatccacgacgacagcctgacctttaaagaggacatccagaaagcccaggtgtccggccagggcgatagcctgcacgagcacattgccaatctggccggcagccccgccattaagaagggcatcctgcagacagtgaaggtggtggacgagctcgtgaaagtgatgggccggcacaagcccgagaacatcgtgatcgaaatggccagagagaaccagaccacccagaagggacagaagaacagccgcgagagaatgaagcggatcgaagagggcatcaaagagctgggcagccagatcctgaaagaacaccccgtggaaaacacccagctgcagaacgagaagctgtacctgtactacctgcagaatgggcgggatatgtacgtggaccaggaactggacatcaaccggctgtccgactacgatgtggacgctatcgtgcctcagagctttctgaaggacgactccatcgataacaaagtgctgactcggagcgacaagaaccggggcaagagcgacaacgtgccctccgaagaggtcgtgaagaagatgaagaactactggcgccagctgctgaatgccaagctgattacccagaggaagttcgacaatctgaccaaggccgagagaggcggcctgagcgaactggataaggccggcttcatcaagagacagctggtggaaacccggcagatcacaaagcacgtggcacagatcctggactcccggatgaacactaagtacgacgagaacgacaaactgatccgggaagtgaaagtgatcaccctgaagtccaagctggtgtccgatttccggaaggatttccagttttacaaagtgcgcgagatcaacaactaccaccacgcccacgacgcctacctgaacgccgtcgtgggaaccgccctgatcaaaaagtaccctaagctggaaagcgagttcgtgtacggcgactacaaggtgtacgacgtgcggaagatgatcgccaagagcgagcaggaaatcggcaaggctaccgccaagtacttcttctacagcaacatcatgaactttttcaagaccgagattaccctggccaacggcgagatccggaagcggcctctgatcgagacaaacggcgaaacaggcgagatcgtgtgggataagggccgggactttgccaccgtgcggaaagtgctgtctatgccccaagtgaatatcgtgaaaaagaccgaggtgcagacaggcggcttcagcaaagagtctatcctgcccaagaggaacagcgacaagctgatcgccagaaagaaggactgggaccctaagaagtacggcggcttcgacagccccaccgtggcctattctgtgctggtggtggccaaagtggaaaagggcaagtccaagaaactgaagagtgtgaaagagctgctggggatcaccatcatggaaagaagcagcttcgagaagaatcccatcgactttctggaagccaagggctacaaagaagtgaaaaaggacctgatcatcaagctgcctaagtactccctgttcgagctggaaaacggccggaagagaatgctggcctctgccggcgaactgcagaagggaaacgaactggccctgccctccaaatatgtgaacttcctgtacctggccagccactatgagaagctgaagggctcccccgaggataatgagcagaaacagctgtttgtggaacagcacaaacactacctggacgagatcatcgagcagatcagcgagttctccaagagagtgatcctggccgacgctaatctggacaaggtgctgagcgcctacaacaagcacagagacaagcctatcagagagcaggccgagaatatcatccacctgtttaccctgaccaatctgggagcccctgccgccttcaagtactttgacaccaccatcgaccggaagaggtacaccagcaccaaagaggtgctggacgccaccctgatccaccagagcatcaccggcctgtacgagacacggatcgacctgtctcagctgggaggcgacgcctatccctatgacgtgcccgattatgccagcctgggcagcggctcccccaagaaaaaacgcaaggtggaagatcctaagaaaaagcggaaagtggacggcggagggccgagctctggcgcacccccaccaagtggagggtctcctgccgggtccccaacatctactgaagaaggcaccagcgaatccgcaacgcccgagtcaggccctggtacctccacagaaccatctgaaggtagtgcgcctggttccccagctggaagccctacttccaccgaagaaggcacgtcaaccgaaccaagtgaaggatctgcccctgggaccagcactgaaccatctgagatgggccctatggagatatacaagacagtgtctgcatggaagagacagccagtgcgggtactgagcctcttcagaaacatcgacaaggtactaaagagtttgggcttcttggaaagcggttctggttctgggggaggaacgctgaagtacgtggaagatgtcacaaatgtcgtgaggagagacgtggagaaatggggcccctttgacctggtgtacggctcgacgcagcccctaggcagctcttgtgatcgctgtcccggctggtacatgttccagttccaccggatcctgcagtatgcgctgcctcgccaggagagtcagcggcccttcttctggatattcatggacaatctgctgctgactgaggatgaccaagagacaactacccgcttccttcagacagaggctgtgaccctccaggatgtccgtggcagagactaccagaatgctatgcgggtgtggagcaacattccagggctgaagagcaagcatgcgcccctgaccccaaaggaagaagagtatctgcaagcccaagtcagaagcaggagcaagctggacgccccgaaagttgacctcctggtgaagaactgccttctcccgctgagagagtacttcaagtatttttctcaaaactcacttcctctttctagcggcaatagtaacgctaacagccgcgggccgagcttcagcagcggcctggtgccgttaagcttgcgcggcagccatatgaaccatgaccaggaatttgaccccccaaaggtttacccacctgtgccagctgagaagaggaagcccatccgcgtgctgtctctctttgatgggattgctacagggctcctggtgctgaaggacctgggcatccaagtggaccgctacattgcctccgaggtgtgtgaggactccatcacggtgggcatggtgcggcaccagggaaagatcatgtacgtcggggacgtccgcagcgtcacacagaagcatatccaggagtggggcccattcgacctggtgattggaggcagtccctgcaatgacctctccattgtcaaccctgcccgcaagggactttatgagggtactggccgcctcttctttgagttctaccgcctcctgcatgatgcgcggcccaaggagggagatgatcgccccttcttctggctctttgagaatgtggtggccatgggcgttagtgacaagagggacatctcgcgatttcttgagtctaaccccgtgatgattgacgccaaagaagtgtctgctgcacacagggcccgttacttctggggtaaccttcctggcatgaacaggcctttggcatccactgtgaatgataagctggagctgcaagagtgtctggagcacggcagaatagccaagttcagcaaagtgaggaccattaccaccaggtcaaactctataaagcagggcaaagaccagcatttccccgtcttcatgaacgagaaggaggacatcctgtggtgcactgaaatggaaagggtgtttggcttccccgtccactacacagacgtctccaacatgagccgcttggcgaggcagagactgctgggccgatcgtggagcgtgccggtcatccgccacctcttcgctccgctgaaggaatattttgcttgtgtggacggcagcggcagcgagacccccggtaccagcgagagcgccacccccgagagccggacactggtgaccttcaaggatgtatttgtggacttcaccagggaggagtggaagctgctggacactgctcagcagatcgtgtacagaaatgtgatgctggagaactataagaacctggtttccttgggttatcagcttactaagccagatgtgatcctccggttggagaagggagaagagcccggcagcggcagcgagacccccggtaccagcgagagcgccacccccgagagccggacactggtgaccttcaaggatgtatttgtggacttcaccagggaggagtggaagctgctggacactgctcagcagatcgtgtacagaaatgtgatgctggagaactataagaacctggtttccttgggttatcagcttactaagccagatgtgatcctccggttggagaagggagaagagcccggcagcggcagcgagacccccggtaccagcgagagcgccacccccgagagccggacactggtgaccttcaaggatgtatttgtggacttcaccagggaggagtggaagctgctggacactgctcagcagatcgtgtacagaaatgtgatgctggagaactataagaacctggtttccttgggttatcagcttactaagccagatgtgatcctccggttggagaagggagaagagccctgagatcccaagcacgcagcaatgcagctcaaaacgcttagcctagccacacccccacgggaaacagcagtgattaacctttagcaataaacgaaagtttaactaagctatactaaccccagggttggtcaatttcgtgccagccacaccctggtactgcatgcacgcaatgctagctgcccctttcccgtcctgggcaccccgagtctcccccgaccccgggtcccaggtatgctcccacctccacctgccccactcaccacctctgctagttccagacacctccgaagatggaaaaaaaaaaaaaaaaaaaaaaaaaaaaaaaaaaaaaaaaaaaaaaaaaaaaaaaaaaaaaaaaaaaaaaaaaaaaaaaaaaaaaaaaaaaaaaaaaaaaaaaaaaaaaaaaaaaaaaaaaaaaaaaaaaaaaaaaaaaaaaaaaaaaaaaaaaaaaaaaaaaaaaaaaaaaaaaaaaaaaaaaaaaaaaaaaaaaaaaaaaaaaaaaaaaaaaaaaaaaaaaaaaaaaaaaaaaaaaaaaaaaaaaaaaaaaaaaaaaaaaaaaaaaaaaaaaaaaaaaaaaaaaaaaaaaaaaaaaaaaaaaaaaaaaaaaaaaaaaaaaaaaaaaaaaaaaaaaaaaaaaaaaaaaaaaaaaaaaaaaaaaaaaaaaaaaaaaaaaaaaaaaaaaaaaaaaccgtcttcaagctttctagaaattcactggccgtcgttttacaacgtcgtgactgggaaaaccctggcgttacccaacttaatcgccttgcagcacatccccctttcgccagctggcgtaatagcgaagaggcccgcaccgatcgcccttcccaacagttgcgcagcctgaatggcgaatggcgcctgatgcggtattttctccttacgcatctgtgcggtatttcacaccgcatatggtgcactctcagtacaatctgctctgatgccgcatagttaagccagccccgacacccgccaacacccgctgacgcgccctgacgggcttgtctgctcccggcatccgcttacagacaagctgtgaccgtctccgggagctgcatgtgtcagaggttttcaccgtcatcaccgaaacgcgcgagacgaaagggcctcgtgatacgcctatttttataggttaatgtcatgataataatggtttcttagacgtcaggtggcacttttcggggaaatgtgcgcggaacccctatttgtttatttttctaaatacattcaaatatgtatccgctcatgagacaataaccctgataaatgcttcaataatattgaaaaaggaagagtatgagtattcaacatttccgtgtcgcccttattcccttttttgcggcattttgccttcctgtttttgctcacccagaaacgctggtgaaagtaaaagatgctgaagatcagttgggtgcacgagtgggttacatcgaactggatctcaacagcggtaagatccttgagagttttcgccccgaagaacgttttccaatgatgagcacttttaaagttctgctatgtggcgcggtattatcccgtattgacgccgggcaagagcaactcggtcgccgcatacactattctcagaatgacttggttgagtactcaccagtcacagaaaagcatcttacggatggcatgacagtaagagaattatgcagtgctgccataaccatgagtgataacactgcggccaacttacttctgacaacgatcggaggaccgaaggagctaaccgcttttttgcacaacatgggggatcatgtaactcgccttgatcgttgggaaccggagctgaatgaagccataccaaacgacgagcgtgacaccacgatgcctgtagcaatggcaacaacgttgcgcaaactattaactggcgaactacttactctagcttcccggcaacaattaatagactggatggaggcggataaagttgcaggaccacttctgcgctcggcccttccggctggctggtttattgctgataaatctggagccggtgagcgtgggtcacgcggtatcattgcagcactggggccagatggtaagccctcccgtatcgtagttatctacacgacggggagtcaggcaactatggatgaacgaaatagacagatcgctgagataggtgcctcactgattaagcattggtaactgtcagaccaagtttactcatatatactttagattgatttaaaacttcatttttaatttaaaaggatctaggtgaagatcctttttgataatctcatgaccaaaatc

SEQ ID NO: 170 - DNA, 10286 bp, synthetic construct
  misc_feature 1..10286: note = V52 DNA
  source 1..10286: mol_type = other DNA
tgtgaccgtctccgggagctgcatgtgtcagaggttttcaccgtcatcaccgaaacgcgcgagacgaaagggcctcgtgatacgcctatttttataggttaatgtcatgataataatggtttcttagacgtcaggtggcacttttcggggaaatgtgcgcggaacccctatttgtttatttttctaaatacattcaaatatgtatccgctcatgagacaataaccctgataaatgcttcaataatattgaaaaaggaagagtatgagtattcaacatttccgtgtcgcccttattcccttttttgcggcattttgccttcctgtttttgctcacccagaaacgctggtgaaagtaaaagatgctgaagatcagttgggtgcacgagtgggttacatcgaactggatctcaacagcggtaagatccttgagagttttcgccccgaagaacgttttccaatgatgagcacttttaaagttctgctatgtggcgcggtattatcccgtattgacgccgggcaagagcaactcggtcgccgcatacactattctcagaatgacttggttgagtactcaccagtcacagaaaagcatcttacggatggcatgacagtaagagaattatgcagtgctgccataaccatgagtgataacactgcggccaacttacttctgacaacgatcggaggaccgaaggagctaaccgcttttttgcacaacatgggggatcatgtaactcgccttgatcgttgggaaccggagctgaatgaagccataccaaacgacgagcgtgacaccacgatgcctgtagcaatggcaacaacgttgcgcaaactattaactggcgaactacttactctagcttcccggcaacaattaatagactggatggaggcggataaagttgcaggaccacttctgcgctcggcccttccggctggctggtttattgctgataaatctggagccggtgagcgtgggtcacgcggtatcattgcagcactggggccagatggtaagccctcccgtatcgtagttatctacacgacggggagtcaggcaactatggatgaacgaaatagacagatcgctgagataggtgcctcactgattaagcattggtaactgtcagaccaagtttactcatatatactttagattgatttaaaacttcatttttaatttaaaaggatctaggtgaagatcctttttgataatctcatgaccaaaatcccttaacgtgagttttcgttccactgagcgtcagaccccgtagaaaagatcaaaggatcttcttgagatcctttttttctgcgcgtaatctgctgcttgcaaacaaaaaaaccaccgctaccagcggtggtttgtttgccggatcaagagctaccaactctttttccgaaggtaactggcttcagcagagcgcagataccaaatactgttcttctagtgtagccgtagttaggccaccacttcaagaactctgtagcaccgcctacatacctcgctctgctaatcctgttaccagtggctgctgccagtggcgataagtcgtgtcttaccgggttggactcaagacgatagttaccggataaggcgcagcggtcgggctgaacggggggttcgtgcacacagcccagcttggagcgaacgacctacaccgaactgagatacctacagcgtgagctatgagaaagcgccacgcttcccgaagggagaaaggcggacaggtatccggtaagcggcagggtcggaacaggagagcgcacgagggagcttccagggggaaacgcctggtatctttatagtcctgtcgggtttcgccacctctgacttgagcgtcgatttttgtgatgctcgtcaggggggcggagcctatggaaaaacgccagcaacgcggcctttttacggttcctggccttttgctggccttttgctcacatgttctttcctgcgttatcccctgattctgtggataaccgtattaccgcctttgagtgagctgataccgctcgccgcagccgaacgaccgagcgcagcgagtcagtgagcgaggaagcggaagagcgcccaatacgcaaaccgcctctccccgcgcgttggccgattcattaatgcagctggcacgacaggtttcccgactggaaagcgggcagtgagcgcaacgcaattaatgtgagttagctcactcattaggcaccccaggctttacactttatgcttccggctcgtatgttgtgtggaattgtgagcggataacaatttcacacaggaaacagctatgaccatgattacgcctctagaaagctttaatacgactcactataaggactcactatttgttttcgcgcccagttgcaaaaagtgtcgacatttgcttctgacacaactgtgttcactagcaacctcaaacagacaccgccaccatggtccctgctgctaagagagtgaaactggatggatccgacaagaagtacagcatcggcctggccatcggcaccaactctgtgggctgggccgtgatcaccgacgagtacaaggtgcccagcaagaaattcaaggtgctgggcaacaccgaccggcacagcatcaagaagaacctgatcggcgccctgctgttcgacagcggagaaacagccgaggccacccggctgaagagaaccgccagaagaagatacaccagacggaagaaccggatctgctatctgcaagagatcttcagcaacgagatggccaaggtggacgacagcttcttccacagactggaagagtccttcctggtggaagaggataagaagcacgagcggcaccccatcttcggcaacatcgtggacgaggtggcctaccacgagaagtaccccaccatctaccacctgagaaagaaactggtggacagcaccgacaaggccgacctgcggctgatctatctggccctggcccacatgatcaagttccggggccacttcctgatcgagggcgacctgaaccccgacaacagcgacgtggacaagctgttcatccagctggtgcagacctacaaccagctgttcgaggaaaaccccatcaacgccagcggcgtggacgccaaggccatcctgtctgccagactgagcaagagcagacggctggaaaatctgatcgcccagctgcccggcgagaagaagaatggcctgttcggcaacctgattgccctgagcctgggcctgacccccaacttcaagagcaacttcgacctggccgaggatgccaaactgcagctgagcaaggacacctacgacgacgacctggacaacctgctggcccagatcggcgaccagtacgccgacctgtttctggccgccaagaacctgtccgacgccatcctgctgagcgacatcctgagagtgaacaccgagatcaccaaggcccccctgagcgcctctatgatcaagagatacgacgagcaccaccaggacctgaccctgctgaaagctctcgtgcggcagcagctgcctgagaagtacaaagagattttcttcgaccagagcaagaacggctacgccggctacatcgatggcggagccagccaggaagagttctacaagttcatcaagcccatcctggaaaagatggacggcaccgaggaactgctcgtgaagctgaacagagaggacctgctgcggaagcagcggaccttcgacaacggcagcatcccccaccagatccacctgggagagctgcacgccattctgcggcggcaggaagatttttacccattcctgaaggacaaccgggaaaagatcgagaagatcctgaccttccgcatcccctactacgtgggccctctggccaggggaaacagcagattcgcctggatgaccagaaagagcgaggaaaccatcaccccctggaacttcgaggaagtggtggacaagggcgccagcgcccagagcttcatcgagcggatgaccaacttcgataagaacctgcccaacgagaaggtgctgcccaagcacagcctgctgtacgagtacttcaccgtgtacaacgagctgaccaaagtgaaatacgtgaccgagggaatgagaaagcccgccttcctgagcggcgagcagaaaaaagccatcgtggacctgctgttcaagaccaaccggaaagtgaccgtgaagcagctgaaagaggactacttcaagaaaatcgagtgcttcgactccgtggaaatctccggcgtggaagatcggttcaacgcctccctgggcacataccacgatctgctgaaaattatcaaggacaaggacttcctggacaatgaggaaaacgaggacattctggaagatatcgtgctgaccctgacactgtttgaggacagagagatgatcgaggaacggctgaaaacctatgcccacctgttcgacgacaaagtgatgaagcagctgaagcggcggagatacaccggctggggcaggctgagccggaagctgatcaacggcatccgggacaagcagtccggcaagacaatcctggatttcctgaagtccgacggcttcgccaacagaaacttcatgcagctgatccacgacgacagcctgacctttaaagaggacatccagaaagcccaggtgtccggccagggcgatagcctgcacgagcacattgccaatctggccggcagccccgccattaagaagggcatcctgcagacagtgaaggtggtggacgagctcgtgaaagtgatgggccggcacaagcccgagaacatcgtgatcgaaatggccagagagaaccagaccacccagaagggacagaagaacagccgcgagagaatgaagcggatcgaagagggcatcaaagagctgggcagccagatcctgaaagaacaccccgtggaaaacacccagctgcagaacgagaagctgtacctgtactacctgcagaatgggcgggatatgtacgtggaccaggaactggacatcaaccggctgtccgactacgatgtggacgctatcgtgcctcagagctttctgaaggacgactccatcgataacaaagtgctgactcggagcgacaagaaccggggcaagagcgacaacgtgccctccgaagaggtcgtgaagaagatgaagaactactggcgccagctgctgaatgccaagctgattacccagaggaagttcgacaatctgaccaaggccgagagaggcggcctgagcgaactggataaggccggcttcatcaagagacagctggtggaaacccggcagatcacaaagcacgtggcacagatcctggactcccggatgaacactaagtacgacgagaacgacaaactgatccgggaagtgaaagtgatcaccctgaagtccaagctggtgtccgatttccggaaggatttccagttttacaaagtgcgcgagatcaacaactaccaccacgcccacgacgcctacctgaacgccgtcgtgggaaccgccctgatcaaaaagtaccctaagctggaaagcgagttcgtgtacggcgactacaaggtgtacgacgtgcggaagatgatcgccaagagcgagcaggaaatcggcaaggctaccgccaagtacttcttctacagcaacatcatgaactttttcaagaccgagattaccctggccaacggcgagatccggaagcggcctctgatcgagacaaacggcgaaacaggcgagatcgtgtgggataagggccgggactttgccaccgtgcggaaagtgctgtctatgccccaagtgaatatcgtgaaaaagaccgaggtgcagacaggcggcttcagcaaagagtctatcctgcccaagaggaacagcgacaagctgatcgccagaaagaaggactgggaccctaagaagtacggcggcttcgacagccccaccgtggcctattctgtgctggtggtggccaaagtggaaaagggcaagtccaagaaactgaagagtgtgaaagagctgctggggatcaccatcatggaaagaagcagcttcgagaagaatcccatcgactttctggaagccaagggctacaaagaagtgaaaaaggacctgatcatcaagctgcctaagtactccctgttcgagctggaaaacggccggaagagaatgctggcctctgccggcgaactgcagaagggaaacgaactggccctgccctccaaatatgtgaacttcctgtacctggccagccactatgagaagctgaagggctcccccgaggataatgagcagaaacagctgtttgtggaacagcacaaacactacctggacgagatcatcgagcagatcagcgagttctccaagagagtgatcctggccgacgctaatctggacaaggtgctgagcgcctacaacaagcacagagacaagcctatcagagagcaggccgagaatatcatccacctgtttaccctgaccaatctgggagcccctgccgccttcaagtactttgacaccaccatcgaccggaagaggtacaccagcaccaaagaggtgctggacgccaccctgatccaccagagcatcaccggcctgtacgagacacggatcgacctgtctcagctgggaggcgacgcctatccctatgacgtgcccgattatgccagcctgggcagcggctcccccaagaaaaaacgcaaggtggaagatcctaagaaaaagcggaaagtggacggcggagggccgagctctggcgcacccccaccaagtggagggtctcctgccgggtccccaacatctactgaagaaggcaccagcgaatccgcaacgcccgagtcaggccctggtacctccacagaaccatctgaaggtagtgcgcctggttccccagctggaagccctacttccaccgaagaaggcacgtcaaccgaaccaagtgaaggatctgcccctgggaccagcactgaaccatctgagcggacactggtgaccttcaaggatgtatttgtggacttcaccagggaggagtggaagctgctggacactgctcagcagatcgtgtacagaaatgtgatgctggagaactataagaacctggtttccttgggttatcagcttactaagccagatgtgatcctccggttggagaagggagaagagcccagcggcagcgagacccccggtaccagcgagagcgctacacccgaatccggccccggcagccccgccggcagccctacaagcaccgaggagggcacctccgaatccgccacccctgagagcggacccggcagcgagcctgccacaagcggcagcgagacacctggaacaagcgagagcgccacacctgaaagcggccccggaacatccaccgagcctagcgagggcagcgcccctggcacaagcacagagccttccgagagcgccacccccgagagcatgggccctatggagatatacaagacagtgtctgcatggaagagacagccagtgcgggtactgagcctcttcagaaacatcgacaaggtactaaagagtttgggcttcttggaaagcggttctggttctgggggaggaacgctgaagtacgtggaagatgtcacaaatgtcgtgaggagagacgtggagaaatggggcccctttgacctggtgtacggctcgacgcagcccctaggcagctcttgtgatcgctgtcccggctggtacatgttccagttccaccggatcctgcagtatgcgctgcctcgccaggagagtcagcggcccttcttctggatattcatggacaatctgctgctgactgaggatgaccaagagacaactacccgcttccttcagacagaggctgtgaccctccaggatgtccgtggcagagactaccagaatgctatgcgggtgtggagcaacattccagggctgaagagcaagcatgcgcccctgaccccaaaggaagaagagtatctgcaagcccaagtcagaagcaggagcaagctggacgccccgaaagttgacctcctggtgaagaactgccttctcccgctgagagagtacttcaagtatttttctcaaaactcacttcctctttctagcggcaatagtaacgctaacagccgcgggccgagcttcagcagcggcctggtgccgttaagcttgcgcggcagccatatgaaccatgaccaggaatttgaccccccaaaggtttacccacctgtgccagctgagaagaggaagcccatccgcgtgctgtctctctttgatgggattgctacagggctcctggtgctgaaggacctgggcatccaagtggaccgctacattgcctccgaggtgtgtgaggactccatcacggtgggcatggtgcggcaccagggaaagatcatgtacgtcggggacgtccgcagcgtcacacagaagcatatccaggagtggggcccattcgacctggtgattggaggcagtccctgcaatgacctctccattgtcaaccctgcccgcaagggactttatgagggtactggccgcctcttctttgagttctaccgcctcctgcatgatgcgcggcccaaggagggagatgatcgccccttcttctggctctttgagaatgtggtggccatgggcgttagtgacaagagggacatctcgcgatttcttgagtctaaccccgtgatgattgacgccaaagaagtgtctgctgcacacagggcccgttacttctggggtaaccttcctggcatgaacaggcctttggcatccactgtgaatgataagctggagctgcaagagtgtctggagcacggcagaatagccaagttcagcaaagtgaggaccattaccaccaggtcaaactctataaagcagggcaaagaccagcatttccccgtcttcatgaacgagaaggaggacatcctgtggtgcactgaaatggaaagggtgtttggcttccccgtccactacacagacgtctccaacatgagccgcttggcgaggcagagactgctgggccgatcgtggagcgtgccggtcatccgccacctcttcgctccgctgaaggaatattttgcttgtgtggacggcagcggcagcgagacccccggtaccagcgagagcgccacccccgagagccggacactggtgaccttcaaggatgtatttgtggacttcaccagggaggagtggaagctgctggacactgctcagcagatcgtgtacagaaatgtgatgctggagaactataagaacctggtttccttgggttatcagcttactaagccagatgtgatcctccggttggagaagggagaagagccctgagatcccaagcacgcagcaatgcagctcaaaacgcttagcctagccacacccccacgggaaacagcagtgattaacctttagcaataaacgaaagtttaactaagctatactaaccccagggttggtcaatttcgtgccagccacaccctggtactgcatgcacgcaatgctagctgcccctttcccgtcctgggcaccccgagtctcccccgaccccgggtcccaggtatgctcccacctccacctgccccactcaccacctctgctagttccagacacctccgaagatggaaaaaaaaaaaaaaaaaaaaaaaaaaaaaaaaaaaaaaaaaaaaaaaaaaaaaaaaaaaaaaaaaaaaaaaaaaaaaaaaaaaaaaaaaaaaaaaaaaaaaaaaaaaaaaaaaaaaaaaaaaaaaaaaaaaaaaaaaaaaaaaaaaaaaaaaaaaaaaaaaaaaaaaaaaaaaaaaaaaaaaaaaaaaaaaaaaaaaaaaaaaaaaaaaaaaaaaaaaaaaaaaaaaaaaaaaaaaaaaaaaaaaaaaaaaaaaaaaaaaaaaaaaaaaaaaaaaaaaaaaaaaaaaaaaaaaaaaaaaaaaaaaaaaaaaaaaaaaaaaaaaaaaaaaaaaaaaaaaaaaaaaaaaaaaaaaaaaaaaaaaaaaaaaaaaaaaaaaaaaaaaaaaaaaaaaaaccgtcttcaagctttctagaaattcactggccgtcgttttacaacgtcgtgactgggaaaaccctggcgttacccaacttaatcgccttgcagcacatccccctttcgccagctggcgtaatagcgaagaggcccgcaccgatcgcccttcccaacagttgcgcagcctgaatggcgaatggcgcctgatgcggtattttctccttacgcatctgtgcggtatttcacaccgcatatggtgcactctcagtacaatctgctctgatgccgcatagttaagccagccccgacacccgccaacacccgctgacgcgccctgacgggcttgtctgctcccggcatccgcttacagacaagc

SEQ ID NO: 171 - DNA, 10400 bp, synthetic construct
  misc_feature 1..10400: note = V53 DNA
  source 1..10400: mol_type = other DNA
tgtgaccgtctccgggagctgcatgtgtcagaggttttcaccgtcatcaccgaaacgcgcgagacgaaagggcctcgtgatacgcctatttttataggttaatgtcatgataataatggtttcttagacgtcaggtggcacttttcggggaaatgtgcgcggaacccctatttgtttatttttctaaatacattcaaatatgtatccgctcatgagacaataaccctgataaatgcttcaataatattgaaaaaggaagagtatgagtattcaacatttccgtgtcgcccttattcccttttttgcggcattttgccttcctgtttttgctcacccagaaacgctggtgaaagtaaaagatgctgaagatcagttgggtgcacgagtgggttacatcgaactggatctcaacagcggtaagatccttgagagttttcgccccgaagaacgttttccaatgatgagcacttttaaagttctgctatgtggcgcggtattatcccgtattgacgccgggcaagagcaactcggtcgccgcatacactattctcagaatgacttggttgagtactcaccagtcacagaaaagcatcttacggatggcatgacagtaagagaattatgcagtgctgccataaccatgagtgataacactgcggccaacttacttctgacaacgatcggaggaccgaaggagctaaccgcttttttgcacaacatgggggatcatgtaactcgccttgatcgttgggaaccggagctgaatgaagccataccaaacgacgagcgtgacaccacgatgcctgtagcaatggcaacaacgttgcgcaaactattaactggcgaactacttactctagcttcccggcaacaattaatagactggatggaggcggataaagttgcaggaccacttctgcgctcggcccttccggctggctggtttattgctgataaatctggagccggtgagcgtgggtcacgcggtatcattgcagcactggggccagatggtaagccctcccgtatcgtagttatctacacgacggggagtcaggcaactatggatgaacgaaatagacagatcgctgagataggtgcctcactgattaagcattggtaactgtcagaccaagtttactcatatatactttagattgatttaaaacttcatttttaatttaaaaggatctaggtgaagatcctttttgataatctcatgaccaaaatcccttaacgtgagttttcgttccactgagcgtcagaccccgtagaaaagatcaaaggatcttcttgagatcctttttttctgcgcgtaatctgctgcttgcaaacaaaaaaaccaccgctaccagcggtggtttgtttgccggatcaagagctaccaactctttttccgaaggtaactggcttcagcagagcgcagataccaaatactgttcttctagtgtagccgtagttaggccaccacttcaagaactctgtagcaccgcctacatacctcgctctgctaatcctgttaccagtggctgctgccagtggcgataagtcgtgtcttaccgggttggactcaagacgatagttaccggataaggcgcagcggtcgggctgaacggggggttcgtgcacacagcccagcttggagcgaacgacctacaccgaactgagatacctacagcgtgagctatgagaaagcgccacgcttcccgaagggagaaaggcggacaggtatccggtaagcggcagggtcggaacaggagagcgcacgagggagcttccagggggaaacgcctggtatctttatagtcctgtcgggtttcgccacctctgacttgagcgtcgatttttgtgatgctcgtcaggggggcggagcctatggaaaaacgccagcaacgcggcctttttacggttcctggccttttgctggccttttgctcacatgttctttcctgcgttatcccctgattctgtggataaccgtattaccgcctttgagtgagctgataccgctcgccgcagccgaacgaccgagcgcagcgagtcagtgagcgaggaagcggaagagcgcccaatacgcaaaccgcctctccccgcgcgttggccgattcattaatgcagctggcacgacaggtttcccgactggaaagcgggcagtgagcgcaacgcaattaatgtgagttagctcactcattaggcaccccaggctttacactttatgcttccggctcgtatgttgtgtggaattgtgagcggataacaatttcacacaggaaacagctatgaccatgattacgcctctagaaagctttaatacgactcactataaggactcactatttgttttcgcgcccagttgcaaaaagtgtcgacatttgcttctgacacaactgtgttcactagcaacctcaaacagacaccgccaccatggtccctgctgctaagagagtgaaactggatggatccgacaagaagtacagcatcggcctggccatcggcaccaactctgtgggctgggccgtgatcaccgacgagtacaaggtgcccagcaagaaattcaaggtgctgggcaacaccgaccggcacagcatcaagaagaacctgatcggcgccctgctgttcgacagcggagaaacagccgaggccacccggctgaagagaaccgccagaagaagatacaccagacggaagaaccggatctgctatctgcaagagatcttcagcaacgagatggccaaggtggacgacagcttcttccacagactggaagagtccttcctggtggaagaggataagaagcacgagcggcaccccatcttcggcaacatcgtggacgaggtggcctaccacgagaagtaccccaccatctaccacctgagaaagaaactggtggacagcaccgacaaggccgacctgcggctgatctatctggccctggcccacatgatcaagttccggggccacttcctgatcgagggcgacctgaaccccgacaacagcgacgtggacaagctgttcatccagctggtgcagacctacaaccagctgttcgaggaaaaccccatcaacgccagcggcgtggacgccaaggccatcctgtctgccagactgagcaagagcagacggctggaaaatctgatcgcccagctgcccggcgagaagaagaatggcctgttcggcaacctgattgccctgagcctgggcctgacccccaacttcaagagcaacttcgacctggccgaggatgccaaactgcagctgagcaaggacacctacgacgacgacctggacaacctgctggcccagatcggcgaccagtacgccgacctgtttctggccgccaagaacctgtccgacgccatcctgctgagcgacatcctgagagtgaacaccgagatcaccaaggcccccctgagcgcctctatgatcaagagatacgacgagcaccaccaggacctgaccctgctgaaagctctcgtgcggcagcagctgcctgagaagtacaaagagattttcttcgaccagagcaagaacggctacgccggctacatcgatggcggagccagccaggaagagttctacaagttcatcaagcccatcctggaaaagatggacggcaccgaggaactgctcgtgaagctgaacagagaggacctgctgcggaagcagcggaccttcgacaacggcagcatcccccaccagatccacctgggagagctgcacgccattctgcggcggcaggaagatttttacccattcctgaaggacaaccgggaaaagatcgagaagatcctgaccttccgcatcccctactacgtgggccctctggccaggggaaacagcagattcgcctggatgaccagaaagagcgaggaaaccatcaccccctggaacttcgaggaagtggtggacaagggcgccagcgcccagagcttcatcgagcggatgaccaacttcgataagaacctgcccaacgagaaggtgctgcccaagcacagcctgctgtacgagtacttcaccgtgtacaacgagctgaccaaagtgaaatacgtgaccgagggaatgagaaagcccgccttcctgagcggcgagcagaaaaaagccatcgtggacctgctgttcaagaccaaccggaaagtgaccgtgaagcagctgaaagaggactacttcaagaaaatcgagtgcttcgactccgtggaaatctccggcgtggaagatcggttcaacgcctccctgggcacataccacgatctgctgaaaattatcaaggacaaggacttcctggacaatgaggaaaacgaggacattctggaagatatcgtgctgaccctgacactgtttgaggacagagagatgatcgaggaacggctgaaaacctatgcccacctgttcgacgacaaagtgatgaagcagctgaagcggcggagatacaccggctggggcaggctgagccggaagctgatcaacggcatccgggacaagcagtccggcaagacaatcctggatttcctgaagtccgacggcttcgccaacagaaacttcatgcagctgatccacgacgacagcctgacctttaaagaggacatccagaaagcccaggtgtccggccagggcgatagcctgcacgagcacattgccaatctggccggcagccccgccattaagaagggcatcctgcagacagtgaaggtggtggacgagctcgtgaaagtgatgggccggcacaagcccgagaacatcgtgatcgaaatggccagagagaaccagaccacccagaagggacagaagaacagccgcgagagaatgaagcggatcgaagagggcatcaaagagctgggcagccagatcctgaaagaacaccccgtggaaaacacccagctgcagaacgagaagctgtacctgtactacctgcagaatgggcgggatatgtacgtggaccaggaactggacatcaaccggctgtccgactacgatgtggacgctatcgtgcctcagagctttctgaaggacgactccatcgataacaaagtgctgactcggagcgacaagaaccggggcaagagcgacaacgtgccctccgaagaggtcgtgaagaagatgaagaactactggcgccagctgctgaatgccaagctgattacccagaggaagttcgacaatctgaccaaggccgagagaggcggcctgagcgaactggataaggccggcttcatcaagagacagctggtggaaacccggcagatcacaaagcacgtggcacagatcctggactcccggatgaacactaagtacgacgagaacgacaaactgatccgggaagtgaaagtgatcaccctgaagtccaagctggtgtccgatttccggaaggatttccagttttacaaagtgcgcgagatcaacaactaccaccacgcccacgacgcctacctgaacgccgtcgtgggaaccgccctgatcaaaaagtaccctaagctggaaagcgagttcgtgtacggcgactacaaggtgtacgacgtgcggaagatgatcgccaagagcgagcaggaaatcggcaaggctaccgccaagtacttcttctacagcaacatcatgaactttttcaagaccgagattaccctggccaacggcgagatccggaagcggcctctgatcgagacaaacggcgaaacaggcgagatcgtgtgggataagggccgggactttgccaccgtgcggaaagtgctgtctatgccccaagtgaatatcgtgaaaaagaccgaggtgcagacaggcggcttcagcaaagagtctatcctgcccaagaggaacagcgacaagctgatcgccagaaagaaggactgggaccctaagaagtacggcggcttcgacagccccaccgtggcctattctgtgctggtggtggccaaagtggaaaagggcaagtccaagaaactgaagagtgtgaaagagctgctggggatcaccatcatggaaagaagcagcttcgagaagaatcccatcgactttctggaagccaagggctacaaagaagtgaaaaaggacctgatcatcaagctgcctaagtactccctgttcgagctggaaaacggccggaagagaatgctggcctctgccggcgaactgcagaagggaaacgaactggccctgccctccaaatatgtgaacttcctgtacctggccagccactatgagaagctgaagggctcccccgaggataatgagcagaaacagctgtttgtggaacagcacaaacactacctggacgagatcatcgagcagatcagcgagttctccaagagagtgatcctggccgacgctaatctggacaaggtgctgagcgcctacaacaagcacagagacaagcctatcagagagcaggccgagaatatcatccacctgtttaccctgaccaatctgggagcccctgccgccttcaagtactttgacaccaccatcgaccggaagaggtacaccagcaccaaagaggtgctggacgccaccctgatccaccagagcatcaccggcctgtacgagacacggatcgacctgtctcagctgggaggcgacgcctatccctatgacgtgcccgattatgccagcctgggcagcggctcccccaagaaaaaacgcaaggtggaagatcctaagaaaaagcggaaagtggacggcggagggccgagctctggcgcacccccaccaagtggagggtctcctgccgggtccccaacatctactgaagaaggcaccagcgaatccgcaacgcccgagtcaggccctggtacctccacagaaccatctgaaggtagtgcgcctggttccccagctggaagccctacttccaccgaagaaggcacgtcaaccgaaccaagtgaaggatctgcccctgggaccagcactgaaccatctgagatgaacaattcccagggaagagtgaccttcgaggacgtgaccgtgaacttcacccaaggcgagtggcagagactgaaccccgagcagagaaacctgtaccgggacgtgatgctggaaaactacagcaacctggtgtccgtcggccagggcgagacaacaaagcctgacgtgatcctgcggctggaacagggcaaagagccttggctggaagaggaagaggtgctcggatctggcagagccgagaagaatggcgatatcggcggacagatctggaagccaaaggatgtgaaagagagtctcagcggcagcgagacccccggtaccagcgagagcgctacacccgaatccggccccggcagccccgccggcagccctacaagcaccgaggagggcacctccgaatccgccacccctgagagcggacccggcagcgagcctgccacaagcggcagcgagacacctggaacaagcgagagcgccacacctgaaagcggccccggaacatccaccgagcctagcgagggcagcgcccctggcacaagcacagagccttccgagagcgccacccccgagagcatgggccctatggagatatacaagacagtgtctgcatggaagagacagccagtgcgggtactgagcctcttcagaaacatcgacaaggtactaaagagtttgggcttcttggaaagcggttctggttctgggggaggaacgctgaagtacgtggaagatgtcacaaatgtcgtgaggagagacgtggagaaatggggcccctttgacctggtgtacggctcgacgcagcccctaggcagctcttgtgatcgctgtcccggctggtacatgttccagttccaccggatcctgcagtatgcgctgcctcgccaggagagtcagcggcccttcttctggatattcatggacaatctgctgctgactgaggatgaccaagagacaactacccgcttccttcagacagaggctgtgaccctccaggatgtccgtggcagagactaccagaatgctatgcgggtgtggagcaacattccagggctgaagagcaagcatgcgcccctgaccccaaaggaagaagagtatctgcaagcccaagtcagaagcaggagcaagctggacgccccgaaagttgacctcctggtgaagaactgccttctcccgctgagagagtacttcaagtatttttctcaaaactcacttcctctttctagcggcaatagtaacgctaacagccgcgggccgagcttcagcagcggcctggtgccgttaagcttgcgcggcagccatatgaaccatgaccaggaatttgaccccccaaaggtttacccacctgtgccagctgagaagaggaagcccatccgcgtgctgtctctctttgatgggattgctacagggctcctggtgctgaaggacctgggcatccaagtggaccgctacattgcctccgaggtgtgtgaggactccatcacggtgggcatggtgcggcaccagggaaagatcatgtacgtcggggacgtccgcagcgtcacacagaagcatatccaggagtggggcccattcgacctggtgattggaggcagtccctgcaatgacctctccattgtcaaccctgcccgcaagggactttatgagggtactggccgcctcttctttgagttctaccgcctcctgcatgatgcgcggcccaaggagggagatgatcgccccttcttctggctctttgagaatgtggtggccatgggcgttagtgacaagagggacatctcgcgatttcttgagtctaaccccgtgatgattgacgccaaagaagtgtctgctgcacacagggcccgttacttctggggtaaccttcctggcatgaacaggcctttggcatccactgtgaatgataagctggagctgcaagagtgtctggagcacggcagaatagccaagttcagcaaagtgaggaccattaccaccaggtcaaactctataaagcagggcaaagaccagcatttccccgtcttcatgaacgagaaggaggacatcctgtggtgcactgaaatggaaagggtgtttggcttccccgtccactacacagacgtctccaacatgagccgcttggcgaggcagagactgctgggccgatcgtggagcgtgccggtcatccgccacctcttcgctccgctgaaggaatattttgcttgtgtggacggcagcggcagcgagacccccggtaccagcgagagcgccacccccgagagccggacactggtgaccttcaaggatgtatttgtggacttcaccagggaggagtggaagctgctggacactgctcagcagatcgtgtacagaaatgtgatgctggagaactataagaacctggtttccttgggttatcagcttactaagccagatgtgatcctccggttggagaagggagaagagccctgagatcccaagcacgcagcaatgcagctcaaaacgcttagcctagccacacccccacgggaaacagcagtgattaacctttagcaataaacgaaagtttaactaagctatactaaccccagggttggtcaatttcgtgccagccacaccctggtactgcatgcacgcaatgctagctgcccctttcccgtcctgggcaccccgagtctcccccgaccccgggtcccaggtatgctcccacctccacctgccccactcaccacctctgctagttccagacacctccgaagatggaaaaaaaaaaaaaaaaaaaaaaaaaaaaaaaaaaaaaaaaaaaaaaaaaaaaaaaaaaaaaaaaaaaaaaaaaaaaaaaaaaaaaaaaaaaaaaaaaaaaaaaaaaaaaaaaaaaaaaaaaaaaaaaaaaaaaaaaaaaaaaaaaaaaaaaaaaaaaaaaaaaaaaaaaaaaaaaaaaaaaaaaaaaaaaaaaaaaaaaaaaaaaaaaaaaaaaaaaaaaaaaaaaaaaaaaaaaaaaaaaaaaaaaaaaaaaaaaaaaaaaaaaaaaaaaaaaaaaaaaaaaaaaaaaaaaaaaaaaaaaaaaaaaaaaaaaaaaaaaaaaaaaaaaaaaaaaaaaaaaaaaaaaaaaaaaaaaaaaaaaaaaaaaaaaaaaaaaaaaaaaaaaaaaaaaaaaccgtcttcaagctttctagaaattcactggccgtcgttttacaacgtcgtgactgggaaaaccctggcgttacccaacttaatcgccttgcagcacatccccctttcgccagctggcgtaatagcgaagaggcccgcaccgatcgcccttcccaacagttgcgcagcctgaatggcgaatggcgcctgatgcggtattttctccttacgcatctgtgcggtatttcacaccgcatatggtgcactctcagtacaatctgctctgatgccgcatagttaagccagccccgacacccgccaacacccgctgacgcgccctgacgggcttgtctgctcccggcatccgcttacagacaagc

SEQ ID NO: 172 - DNA, 10418 bp, synthetic construct
  misc_feature 1..10418: note = V54 DNA
  source 1..10418: mol_type = other DNA
atgaaccatgaccaggaatttgaccccccaaaggtttacccacctgtgccagctgagaagaggaagcccatccgcgtgctgtctctctttgatgggattgctacagggctcctggtgctgaaggacctgggcatccaagtggaccgctacattgcctccgaggtgtgtgaggactccatcacggtgggcatggtgcggcaccagggaaagatcatgtacgtcggggacgtccgcagcgtcacacagaagcatatccaggagtggggcccattcgacctggtgattggaggcagtccctgcaatgacctctccattgtcaaccctgcccgcaagggactttatgagggtactggccgcctcttctttgagttctaccgcctcctgcatgatgcgcggcccaaggagggagatgatcgccccttcttctggctctttgagaatgtggtggccatgggcgttagtgacaagagggacatctcgcgatttcttgagtctaaccccgtgatgattgacgccaaagaagtgtctgctgcacacagggcccgttacttctggggtaaccttcctggcatgaacaggcctttggcatccactgtgaatgataagctggagctgcaagagtgtctggagcacggcagaatagccaagttcagcaaagtgaggaccattaccaccaggtcaaactctataaagcagggcaaagaccagcatttccccgtcttcatgaacgagaaggaggacatcctgtggtgcactgaaatggaaagggtgtttggcttccccgtccactacacagacgtctccaacatgagccgcttggcgaggcagagactgctgggccgatcgtggagcgtgccggtcatccgccacctcttcgctccgctgaaggaatattttgcttgtgtgtctagcggcaatagtaacgctaacagccgcgggccgagcttcagcagcggcctggtgccgttaagcttgcgcggcagccatatgttcgaaaccgtgcctgtgtggaggagacagccagtccgggtgctgtccctttttgaagacatcaagaaagagctgacgagtttgggctttttggaaagtggttctgacccgggacaactgaagcatgtggttgatgtcacagacacagtgaggaaggatgtggaggagtggggacccttcgatcttgtgtacggcgccacacctcccctgggccacacctgtgaccgtcctcccagctggtacctgttccagttccaccggctcctgcagtacgcacggcccaagccaggcagccccaggcccttcttctggatgttcgtggacaatctggtgctgaacaaggaagacctggacgtcgcatctcgcttcctggagatggagccagtcaccatcccagatgtccacggcggatccttgcagaatgctgtccgcgtgtggagcaacatcccagccataaggagcagcaggcactgggctctggtttcggaagaagaattgtccctgctggcccagaacaagcagagctcgaagctcgcggccaagtggcccaccaagctggtgaagaactgctttctccccctaagagaatatttcaagtatttttcagacggcagcggcagcgagacccccggtaccagcgagagcgccacccccgagagcatgaacaattcccagggaagagtgaccttcgaggatgtcactgtgaacttcacccagggggagtggcagcggctgaatcccgaacagagaaacttgtacagggatgtgatgctggagaattacagcaaccttgtctctgtgggacaaggggaaaccaccaaacccgatgtgatcttgaggttggaacaaggaaaggagccatggttggaggaagaggaagtgctgggaagtggccgtgcagaaaaaaatggggacattggagggcagatttggaagccaaaggatgtgaaagagagtctcggagggccgagctctggcgcacccccaccaagtggagggtctcctgccgggtccccaacatctactgaagaaggcaccagcgaatccgcaacgcccgagtcaggccctggtacctccacagaaccatctgaaggtagtgcgcctggttccccagctggaagccctacttccaccgaagaaggcacgtcaaccgaaccaagtgaaggatctgcccctgggaccagcactgaaccatctgagccaaaaaagaagagaaaggtaatggacaagaagtacagcatcggcctggccatcggcaccaactctgtgggctgggccgtgatcaccgacgagtacaaggtgcccagcaagaaattcaaggtgctgggcaacaccgaccggcacagcatcaagaagaacctgatcggcgccctgctgttcgacagcggagaaacagccgaggccacccggctgaagagaaccgccagaagaagatacaccagacggaagaaccggatctgctatctgcaagagatcttcagcaacgagatggccaaggtggacgacagcttcttccacagactggaagagtccttcctggtggaagaggataagaagcacgagcggcaccccatcttcggcaacatcgtggacgaggtggcctaccacgagaagtaccccaccatctaccacctgagaaagaaactggtggacagcaccgacaaggccgacctgcggctgatctatctggccctggcccacatgatcaagttccggggccacttcctgatcgagggcgacctgaaccccgacaacagcgacgtggacaagctgttcatccagctggtgcagacctacaaccagctgttcgaggaaaaccccatcaacgccagcggcgtggacgccaaggccatcctgtctgccagactgagcaagagcagacggctggaaaatctgatcgcccagctgcccggcgagaagaagaatggcctgttcggcaacctgattgccctgagcctgggcctgacccccaacttcaagagcaacttcgacctggccgaggatgccaaactgcagctgagcaaggacacctacgacgacgacctggacaacctgctggcccagatcggcgaccagtacgccgacctgtttctggccgccaagaacctgtccgacgccatcctgctgagcgacatcctgagagtgaacaccgagatcaccaaggcccccctgagcgcctctatgatcaagagatacgacgagcaccaccaggacctgaccctgctgaaagctctcgtgcggcagcagctgcctgagaagtacaaagagattttcttcgaccagagcaagaacggctacgccggctacatcgatggcggagccagccaggaagagttctacaagttcatcaagcccatcctggaaaagatggacggcaccgaggaactgctcgtgaagctgaacagagaggacctgctgcggaagcagcggaccttcgacaacggcagcatcccccaccagatccacctgggagagctgcacgccattctgcggcggcaggaagatttttacccattcctgaaggacaaccgggaaaagatcgagaagatcctgaccttccgcatcccctactacgtgggccctctggccaggggaaacagcagattcgcctggatgaccagaaagagcgaggaaaccatcaccccctggaacttcgaggaagtggtggacaagggcgccagcgcccagagcttcatcgagcggatgaccaacttcgataagaacctgcccaacgagaaggtgctgcccaagcacagcctgctgtacgagtacttcaccgtgtacaacgagctgaccaaagtgaaatacgtgaccgagggaatgagaaagcccgccttcctgagcggcgagcagaaaaaagccatcgtggacctgctgttcaagaccaaccggaaagtgaccgtgaagcagctgaaagaggactacttcaagaaaatcgagtgcttcgactccgtggaaatctccggcgtggaagatcggttcaacgcctccctgggcacataccacgatctgctgaaaattatcaaggacaaggacttcctggacaatgaggaaaacgaggacattctggaagatatcgtgctgaccctgacactgtttgaggacagagagatgatcgaggaacggctgaaaacctatgcccacctgttcgacgacaaagtgatgaagcagctgaagcggcggagatacaccggctggggcaggctgagccggaagctgatcaacggcatccgggacaagcagtccggcaagacaatcctggatttcctgaagtccgacggcttcgccaacagaaacttcatgcagctgatccacgacgacagcctgacctttaaagaggacatccagaaagcccaggtgtccggccagggcgatagcctgcacgagcacattgccaatctggccggcagccccgccattaagaagggcatcctgcagacagtgaaggtggtggacgagctcgtgaaagtgatgggccggcacaagcccgagaacatcgtgatcgaaatggccagagagaaccagaccacccagaagggacagaagaacagccgcgagagaatgaagcggatcgaagagggcatcaaagagctgggcagccagatcctgaaagaacaccccgtggaaaacacccagctgcagaacgagaagctgtacctgtactacctgcagaatgggcgggatatgtacgtggaccaggaactggacatcaaccggctgtccgactacgatgtggacgctatcgtgcctcagagctttctgaaggacgactccatcgataacaaagtgctgactcggagcgacaagaaccggggcaagagcgacaacgtgccctccgaagaggtcgtgaagaagatgaagaactactggcgccagctgctgaatgccaagctgattacccagaggaagttcgacaatctgaccaaggccgagagaggcggcctgagcgaactggataaggccggcttcatcaagagacagctggtggaaacccggcagatcacaaagcacgtggcacagatcctggactcccggatgaacactaagtacgacgagaacgacaaactgatccgggaagtgaaagtgatcaccctgaagtccaagctggtgtccgatttccggaaggatttccagttttacaaagtgcgcgagatcaacaactaccaccacgcccacgacgcctacctgaacgccgtcgtgggaaccgccctgatcaaaaagtaccctaagctggaaagcgagttcgtgtacggcgactacaaggtgtacgacgtgcggaagatgatcgccaagagcgagcaggaaatcggcaaggctaccgccaagtacttcttctacagcaacatcatgaactttttcaagaccgagattaccctggccaacggcgagatccggaagcggcctctgatcgagacaaacggcgaaacaggcgagatcgtgtgggataagggccgggactttgccaccgtgcggaaagtgctgtctatgccccaagtgaatatcgtgaaaaagaccgaggtgcagacaggcggcttcagcaaagagtctatcctgcccaagaggaacagcgacaagctgatcgccagaaagaaggactgggaccctaagaagtacggcggcttcgacagccccaccgtggcctattctgtgctggtggtggccaaagtggaaaagggcaagtccaagaaactgaagagtgtgaaagagctgctggggatcaccatcatggaaagaagcagcttcgagaagaatcccatcgactttctggaagccaagggctacaaagaagtgaaaaaggacctgatcatcaagctgcctaagtactccctgttcgagctggaaaacggccggaagagaatgctggcctctgccggcgaactgcagaagggaaacgaactggccctgccctccaaatatgtgaacttcctgtacctggccagccactatgagaagctgaagggctcccccgaggataatgagcagaaacagctgtttgtggaacagcacaaacactacctggacgagatcatcgagcagatcagcgagttctccaagagagtgatcctggccgacgctaatctggacaaggtgctgagcgcctacaacaagcacagagacaagcctatcagagagcaggccgagaatatcatccacctgtttaccctgaccaatctgggagcccctgccgccttcaagtactttgacaccaccatcgaccggaagaggtacaccagcaccaaagaggtgctggacgccaccctgatccaccagagcatcaccggcctgtacgagacacggatcgacctgtctcagctgggaggcgacgcctatccctatgacgtgcccgattatgccagcctgggcagcggctcccccaagaaaaaacgcaaggtggaagatcctaagaaaaagcggaaagtggacggcctcgaggctactaacttcagcctgctgaagcaggctggagacgtggaggagaaccctggacctatgcattaatgagatcccaagcacgcagcaatgcagctcaaaacgcttagcctagccacacccccacgggaaacagcagtgattaacctttagcaataaacgaaagtttaactaagctatactaaccccagggttggtcaatttcgtgccagccacaccctggtactgcatgcacgcaatgctagctgcccctttcccgtcctgggcaccccgagtctcccccgaccccgggtcccaggtatgctcccacctccacctgccccactcaccacctctgctagttccagacacctccgagacgaggaaaaaaaaaaaaaaaaaaaaaaaaaaaaaaaaaaaaaaaaaaaaaaaaaaaaaaaaaaaaaaaaaaaaaaaaaaaaaaaaaaaaaaaaaaaaaaaaaaaaaaaaaaaaaaaaaaaaaaaaaaaaaaaaaaaaaaaaaaaaaaaaaaaaaaaaaaaaaaaaaaaaaaaaaaaaaaaaaaaaaaaaaaaaaaaaaaaaaaaaaaaaaaaaaaaaaaaaaaaaaaaaaaaaaaaaaaaaaaaaaaaaaaaaaaaaaaaaaaaaaaaaaaaaaaaaaaaaaaaaaaaaaaaaaaaaaaaaaaaaaaaaaaaaaaaaaaaaaaaaaaaaaaaaaaaaaaaaaaaaaaaaaaaaaaaaaaaaaaaaaaaaaaaaaaaaaaaaaaaaaaaaaaaaaaaaaaccgtcttcaagctttctagaaattcactggccgtcgttttacaacgtcgtgactgggaaaaccctggcgttacccaacttaatcgccttgcagcacatccccctttcgccagctggcgtaatagcgaagaggcccgcaccgatcgcccttcccaacagttgcgcagcctgaatggcgaatggcgcctgatgcggtattttctccttacgcatctgtgcggtatttcacaccgcatatggtgcactctcagtacaatctgctctgatgccgcatagttaagccagccccgacacccgccaacacccgctgacgcgccctgacgggcttgtctgctcccggcatccgcttacagacaagctgtgaccgtctccgggagctgcatgtgtcagaggttttcaccgtcatcaccgaaacgcgcgagacgaaagggcctcgtgatacgcctatttttataggttaatgtcatgataataatggtttcttagacgtcaggtggcacttttcggggaaatgtgcgcggaacccctatttgtttatttttctaaatacattcaaatatgtatccgctcatgagacaataaccctgataaatgcttcaataatattgaaaaaggaagagtatgagtattcaacatttccgtgtcgcccttattcccttttttgcggcattttgccttcctgtttttgctcacccagaaacgctggtgaaagtaaaagatgctgaagatcagttgggtgcacgagtgggttacatcgaactggatctcaacagcggtaagatccttgagagttttcgccccgaagaacgttttccaatgatgagcacttttaaagttctgctatgtggcgcggtattatcccgtattgacgccgggcaagagcaactcggtcgccgcatacactattctcagaatgacttggttgagtactcaccagtcacagaaaagcatcttacggatggcatgacagtaagagaattatgcagtgctgccataaccatgagtgataacactgcggccaacttacttctgacaacgatcggaggaccgaaggagctaaccgcttttttgcacaacatgggggatcatgtaactcgccttgatcgttgggaaccggagctgaatgaagccataccaaacgacgagcgtgacaccacgatgcctgtagcaatggcaacaacgttgcgcaaactattaactggcgaactacttactctagcttcccggcaacaattaatagactggatggaggcggataaagttgcaggaccacttctgcgctcggcccttccggctggctggtttattgctgataaatctggagccggtgagcgtgggtctcgcggtatcattgcagcactggggccagatggtaagccctcccgtatcgtagttatctacacgacggggagtcaggcaactatggatgaacgaaatagacagatcgctgagataggtgcctcactgattaagcattggtaactgtcagaccaagtttactcatatatactttagattgatttaaaacttcatttttaatttaaaaggatctaggtgaagatcctttttgataatctcatgaccaaaatcccttaacgtgagttttcgttccactgagcgtcagaccccgtagaaaagatcaaaggatcttcttgagatcctttttttctgcgcgtaatctgctgcttgcaaacaaaaaaaccaccgctaccagcggtggtttgtttgccggatcaagagctaccaactctttttccgaaggtaactggcttcagcagagcgcagataccaaatactgttcttctagtgtagccgtagttaggccaccacttcaagaactctgtagcaccgcctacatacctcgctctgctaatcctgttaccagtggctgctgccagtggcgataagtcgtgtcttaccgggttggactcaagacgatagttaccggataaggcgcagcggtcgggctgaacggggggttcgtgcacacagcccagcttggagcgaacgacctacaccgaactgagatacctacagcgtgagctatgagaaagcgccacgcttcccgaagggagaaaggcggacaggtatccggtaagcggcagggtcggaacaggagagcgcacgagggagcttccagggggaaacgcctggtatctttatagtcctgtcgggtttcgccacctctgacttgagcgtcgatttttgtgatgctcgtcaggggggcggagcctatggaaaaacgccagcaacgcggcctttttacggttcctggccttttgctggccttttgctcacatgttctttcctgcgttatcccctgattctgtggataaccgtattaccgcctttgagtgagctgataccgctcgccgcagccgaacgaccgagcgcagcgagtcagtgagcgaggaagcggaagagcgcccaatacgcaaaccgcctctccccgcgcgttggccgattcattaatgcagctggcacgacaggtttcccgactggaaagcgggcagtgagcgcaacgcaattaatgtgagttagctcactcattaggcaccccaggctttacactttatgcttccggctcgtatgttgtgtggaattgtgagcggataacaatttcacacaggaaacagctatgaccatgattacgcctctagaaagctttaatacgactcactataaggactcactatttgttttcgcgcccagttgcaaaaagtgtcgacatttgcttctgacacaactgtgttcactagcaacctcaaacagacaccttaatgccaccatggtgcggacactggtgaccttcaaggatgtatttgtggacttcaccagggaggagtggaagctgctggacactgctcagcagatcgtgtacagaaatgtgatgctggagaactataagaacctggtttccttgggttatcagcttactaagccagatgtgatcctccggttggagaagggagaagagcccggagggccgagctctggcgcacccccaccaagtggagggtctcctgccgggtccccaacatctactgaagaaggcaccagcgaatccgcaacgcccgagtcaggccctggtacctccacagaaccatctgaaggtagtgcgcctggttccccagctggaagccctacttccaccgaagaaggcacgtcaaccgaaccaagtgaaggatctgcccctgggaccagcactgaaccatctgagccaaaaaagaagagaaaggta

SEQ ID NO: 173 - DNA, 10409 bp, synthetic construct
  misc_feature 1..10409: note = V55 DNA
  source 1..10409: mol_type = other DNA
ttttttgcacaacatgggggatcatgtaactcgccttgatcgttgggaaccggagctgaatgaagccataccaaacgacgagcgtgacaccacgatgcctgtagcaatggcaacaacgttgcgcaaactattaactggcgaactacttactctagcttcccggcaacaattaatagactggatggaggcggataaagttgcaggaccacttctgcgctcggcccttccggctggctggtttattgctgataaatctggagccggtgagcgtgggtctcgcggtatcattgcagcactggggccagatggtaagccctcccgtatcgtagttatctacacgacggggagtcaggcaactatggatgaacgaaatagacagatcgctgagataggtgcctcactgattaagcattggtaactgtcagaccaagtttactcatatatactttagattgatttaaaacttcatttttaatttaaaaggatctaggtgaagatcctttttgataatctcatgaccaaaatcccttaacgtgagttttcgttccactgagcgtcagaccccgtagaaaagatcaaaggatcttcttgagatcctttttttctgcgcgtaatctgctgcttgcaaacaaaaaaaccaccgctaccagcggtggtttgtttgccggatcaagagctaccaactctttttccgaaggtaactggcttcagcagagcgcagataccaaatactgttcttctagtgtagccgtagttaggccaccacttcaagaactctgtagcaccgcctacatacctcgctctgctaatcctgttaccagtggctgctgccagtggcgataagtcgtgtcttaccgggttggactcaagacgatagttaccggataaggcgcagcggtcgggctgaacggggggttcgtgcacacagcccagcttggagcgaacgacctacaccgaactgagatacctacagcgtgagctatgagaaagcgccacgcttcccgaagggagaaaggcggacaggtatccggtaagcggcagggtcggaacaggagagcgcacgagggagcttccagggggaaacgcctggtatctttatagtcctgtcgggtttcgccacctctgacttgagcgtcgatttttgtgatgctcgtcaggggggcggagcctatggaaaaacgccagcaacgcggcctttttacggttcctggccttttgctggccttttgctcacatgttctttcctgcgttatcccctgattctgtggataaccgtattaccgcctttgagtgagctgataccgctcgccgcagccgaacgaccgagcgcagcgagtcagtgagcgaggaagcggaagagcgcccaatacgcaaaccgcctctccccgcgcgttggccgattcattaatgcagctggcacgacaggtttcccgactggaaagcgggcagtgagcgcaacgcaattaatgtgagttagctcactcattaggcaccccaggctttacactttatgcttccggctcgtatgttgtgtggaattgtgagcggataacaatttcacacaggaaacagctatgaccatgattacgcctctagaaagctttaatacgactcactataaggactcactatttgttttcgcgcccagttgcaaaaagtgtcgacatttgcttctgacacaactgtgttcactagcaacctcaaacagacaccttaatgccaccatggtgcggacactggtgaccttcaaggatgtatttgtggacttcaccagggaggagtggaagctgctggacactgctcagcagatcgtgtacagaaatgtgatgctggagaactataagaacctggtttccttgggttatcagcttactaagccagatgtgatcctccggttggagaagggagaagagcccggagggccgagctctggcgcacccccaccaagtggagggtctcctgccgggtccccaacatctactgaagaaggcaccagcgaatccgcaacgcccgagtcaggccctggtacctccacagaaccatctgaaggtagtgcgcctggttccccagctggaagccctacttccaccgaagaaggcacgtcaaccgaaccaagtgaaggatctgcccctgggaccagcactgaaccatctgagccaaaaaagaagagaaaggtaaacaattcccagggaagagtgaccttcgaggatgtcactgtgaacttcacccagggggagtggcagcggctgaatcccgaacagagaaacttgtacagggatgtgatgctggagaattacagcaaccttgtctctgtgggacaaggggaaaccaccaaacccgatgtgatcttgaggttggaacaaggaaaggagccatggttggaggaagaggaagtgctgggaagtggccgtgcagaaaaaaatggggacattggagggcagatttggaagccaaaggatgtgaaagagagtctcagcggcagcgagacccccggtaccagcgagagcgccacccccgagagcatgaaccatgaccaggaatttgaccccccaaaggtttacccacctgtgccagctgagaagaggaagcccatccgcgtgctgtctctctttgatgggattgctacagggctcctggtgctgaaggacctgggcatccaagtggaccgctacattgcctccgaggtgtgtgaggactccatcacggtgggcatggtgcggcaccagggaaagatcatgtacgtcggggacgtccgcagcgtcacacagaagcatatccaggagtggggcccattcgacctggtgattggaggcagtccctgcaatgacctctccattgtcaaccctgcccgcaagggactttatgagggtactggccgcctcttctttgagttctaccgcctcctgcatgatgcgcggcccaaggagggagatgatcgccccttcttctggctctttgagaatgtggtggccatgggcgttagtgacaagagggacatctcgcgatttcttgagtctaaccccgtgatgattgacgccaaagaagtgtctgctgcacacagggcccgttacttctggggtaaccttcctggcatgaacaggcctttggcatccactgtgaatgataagctggagctgcaagagtgtctggagcacggcagaatagccaagttcagcaaagtgaggaccattaccaccaggtcaaactctataaagcagggcaaagaccagcatttccccgtcttcatgaacgagaaggaggacatcctgtggtgcactgaaatggaaagggtgtttggcttccccgtccactacacagacgtctccaacatgagccgcttggcgaggcagagactgctgggccgatcgtggagcgtgccggtcatccgccacctcttcgctccgctgaaggaatattttgcttgtgtgtctagcggcaatagtaacgctaacagccgcgggccgagcttcagcagcggcctggtgccgttaagcttgcgcggcagccatatgttcgaaaccgtgcctgtgtggaggagacagccagtccgggtgctgtccctttttgaagacatcaagaaagagctgacgagtttgggctttttggaaagtggttctgacccgggacaactgaagcatgtggttgatgtcacagacacagtgaggaaggatgtggaggagtggggacccttcgatcttgtgtacggcgccacacctcccctgggccacacctgtgaccgtcctcccagctggtacctgttccagttccaccggctcctgcagtacgcacggcccaagccaggcagccccaggcccttcttctggatgttcgtggacaatctggtgctgaacaaggaagacctggacgtcgcatctcgcttcctggagatggagccagtcaccatcccagatgtccacggcggatccttgcagaatgctgtccgcgtgtggagcaacatcccagccataaggagcagcaggcactgggctctggtttcggaagaagaattgtccctgctggcccagaacaagcagagctcgaagctcgcggccaagtggcccaccaagctggtgaagaactgctttctccccctaagagaatatttcaagtatttttcaggagggccgagctctggcgcacccccaccaagtggagggtctcctgccgggtccccaacatctactgaagaaggcaccagcgaatccgcaacgcccgagtcaggccctggtacctccacagaaccatctgaaggtagtgcgcctggttccccagctggaagccctacttccaccgaagaaggcacgtcaaccgaaccaagtgaaggatctgcccctgggaccagcactgaaccatctgagccaaaaaagaagagaaaggtaatggacaagaagtacagcatcggcctggccatcggcaccaactctgtgggctgggccgtgatcaccgacgagtacaaggtgcccagcaagaaattcaaggtgctgggcaacaccgaccggcacagcatcaagaagaacctgatcggcgccctgctgttcgacagcggagaaacagccgaggccacccggctgaagagaaccgccagaagaagatacaccagacggaagaaccggatctgctatctgcaagagatcttcagcaacgagatggccaaggtggacgacagcttcttccacagactggaagagtccttcctggtggaagaggataagaagcacgagcggcaccccatcttcggcaacatcgtggacgaggtggcctaccacgagaagtaccccaccatctaccacctgagaaagaaactggtggacagcaccgacaaggccgacctgcggctgatctatctggccctggcccacatgatcaagttccggggccacttcctgatcgagggcgacctgaaccccgacaacagcgacgtggacaagctgttcatccagctggtgcagacctacaaccagctgttcgaggaaaaccccatcaacgccagcggcgtggacgccaaggccatcctgtctgccagactgagcaagagcagacggctggaaaatctgatcgcccagctgcccggcgagaagaagaatggcctgttcggcaacctgattgccctgagcctgggcctgacccccaacttcaagagcaacttcgacctggccgaggatgccaaactgcagctgagcaaggacacctacgacgacgacctggacaacctgctggcccagatcggcgaccagtacgccgacctgtttctggccgccaagaacctgtccgacgccatcctgctgagcgacatcctgagagtgaacaccgagatcaccaaggcccccctgagcgcctctatgatcaagagatacgacgagcaccaccaggacctgaccctgctgaaagctctcgtgcggcagcagctgcctgagaagtacaaagagattttcttcgaccagagcaagaacggctacgccggctacatcgatggcggagccagccaggaagagttctacaagttcatcaagcccatcctggaaaagatggacggcaccgaggaactgctcgtgaagctgaacagagaggacctgctgcggaagcagcggaccttcgacaacggcagcatcccccaccagatccacctgggagagctgcacgccattctgcggcggcaggaagatttttacccattcctgaaggacaaccgggaaaagatcgagaagatcctgaccttccgcatcccctactacgtgggccctctggccaggggaaacagcagattcgcctggatgaccagaaagagcgaggaaaccatcaccccctggaacttcgaggaagtggtggacaagggcgccagcgcccagagcttcatcgagcggatgaccaacttcgataagaacctgcccaacgagaaggtgctgcccaagcacagcctgctgtacgagtacttcaccgtgtacaacgagctgaccaaagtgaaatacgtgaccgagggaatgagaaagcccgccttcctgagcggcgagcagaaaaaagccatcgtggacctgctgttcaagaccaaccggaaagtgaccgtgaagcagctgaaagaggactacttcaagaaaatcgagtgcttcgactccgtggaaatctccggcgtggaagatcggttcaacgcctccctgggcacataccacgatctgctgaaaattatcaaggacaaggacttcctggacaatgaggaaaacgaggacattctggaagatatcgtgctgaccctgacactgtttgaggacagagagatgatcgaggaacggctgaaaacctatgcccacctgttcgacgacaaagtgatgaagcagctgaagcggcggagatacaccggctggggcaggctgagccggaagctgatcaacggcatccgggacaagcagtccggcaagacaatcctggatttcctgaagtccgacggcttcgccaacagaaacttcatgcagctgatccacgacgacagcctgacctttaaagaggacatccagaaagcccaggtgtccggccagggcgatagcctgcacgagcacattgccaatctggccggcagccccgccattaagaagggcatcctgcagacagtgaaggtggtggacgagctcgtgaaagtgatgggccggcacaagcccgagaacatcgtgatcgaaatggccagagagaaccagaccacccagaagggacagaagaacagccgcgagagaatgaagcggatcgaagagggcatcaaagagctgggcagccagatcctgaaagaacaccccgtggaaaacacccagctgcagaacgagaagctgtacctgtactacctgcagaatgggcgggatatgtacgtggaccaggaactggacatcaaccggctgtccgactacgatgtggacgctatcgtgcctcagagctttctgaaggacgactccatcgataacaaagtgctgactcggagcgacaagaaccggggcaagagcgacaacgtgccctccgaagaggtcgtgaagaagatgaagaactactggcgccagctgctgaatgccaagctgattacccagaggaagttcgacaatctgaccaaggccgagagaggcggcctgagcgaactggataaggccggcttcatcaagagacagctggtggaaacccggcagatcacaaagcacgtggcacagatcctggactcccggatgaacactaagtacgacgagaacgacaaactgatccgggaagtgaaagtgatcaccctgaagtccaagctggtgtccgatttccggaaggatttccagttttacaaagtgcgcgagatcaacaactaccaccacgcccacgacgcctacctgaacgccgtcgtgggaaccgccctgatcaaaaagtaccctaagctggaaagcgagttcgtgtacggcgactacaaggtgtacgacgtgcggaagatgatcgccaagagcgagcaggaaatcggcaaggctaccgccaagtacttcttctacagcaacatcatgaactttttcaagaccgagattaccctggccaacggcgagatccggaagcggcctctgatcgagacaaacggcgaaacaggcgagatcgtgtgggataagggccgggactttgccaccgtgcggaaagtgctgtctatgccccaagtgaatatcgtgaaaaagaccgaggtgcagacaggcggcttcagcaaagagtctatcctgcccaagaggaacagcgacaagctgatcgccagaaagaaggactgggaccctaagaagtacggcggcttcgacagccccaccgtggcctattctgtgctggtggtggccaaagtggaaaagggcaagtccaagaaactgaagagtgtgaaagagctgctggggatcaccatcatggaaagaagcagcttcgagaagaatcccatcgactttctggaagccaagggctacaaagaagtgaaaaaggacctgatcatcaagctgcctaagtactccctgttcgagctggaaaacggccggaagagaatgctggcctctgccggcgaactgcagaagggaaacgaactggccctgccctccaaatatgtgaacttcctgtacctggccagccactatgagaagctgaagggctcccccgaggataatgagcagaaacagctgtttgtggaacagcacaaacactacctggacgagatcatcgagcagatcagcgagttctccaagagagtgatcctggccgacgctaatctggacaaggtgctgagcgcctacaacaagcacagagacaagcctatcagagagcaggccgagaatatcatccacctgtttaccctgaccaatctgggagcccctgccgccttcaagtactttgacaccaccatcgaccggaagaggtacaccagcaccaaagaggtgctggacgccaccctgatccaccagagcatcaccggcctgtacgagacacggatcgacctgtctcagctgggaggcgacgcctatccctatgacgtgcccgattatgccagcctgggcagcggctcccccaagaaaaaacgcaaggtggaagatcctaagaaaaagcggaaagtggacggcctcgaggctactaacttcagcctgctgaagcaggctggagacgtggaggagaaccctggacctatgcattaatgagatcccaagcacgcagcaatgcagctcaaaacgcttagcctagccacacccccacgggaaacagcagtgattaacctttagcaataaacgaaagtttaactaagctatactaaccccagggttggtcaatttcgtgccagccacaccctggtactgcatgcacgcaatgctagctgcccctttcccgtcctgggcaccccgagtctcccccgaccccgggtcccaggtatgctcccacctccacctgccccactcaccacctctgctagttccagacacctccgagacgaggaaaaaaaaaaaaaaaaaaaaaaaaaaaaaaaaaaaaaaaaaaaaaaaaaaaaaaaaaaaaaaaaaaaaaaaaaaaaaaaaaaaaaaaaaaaaaaaaaaaaaaaaaaaaaaaaaaaaaaaaaaaaaaaaaaaaaaaaaaaaaaaaaaaaaaaaaaaaaaaaaaaaaaaaaaaaaaaaaaaaaaaaaaaaaaaaaaaaaaaaaaaaaaaaaaaaaaaaaaaaaaaaaaaaaaaaaaaaaaaaaaaaaaaaaaaaaaaaaaaaaaaaaaaaaaaaaaaaaaaaaaaaaaaaaaaaaaaaaaaaaaaaaaaaaaaaaaaaaaaaaaaaaaaaaaaaaaaaaaaaaaaaaaaaaaaaaaaaaaaaaaaaaaaaaaaaaaaaaaaaaaaaaaaaaaaaaaccgtcttcaagctttctagaaattcactggccgtcgttttacaacgtcgtgactgggaaaaccctggcgttacccaacttaatcgccttgcagcacatccccctttcgccagctggcgtaatagcgaagaggcccgcaccgatcgcccttcccaacagttgcgcagcctgaatggcgaatggcgcctgatgcggtattttctccttacgcatctgtgcggtatttcacaccgcatatggtgcactctcagtacaatctgctctgatgccgcatagttaagccagccccgacacccgccaacacccgctgacgcgccctgacgggcttgtctgctcccggcatccgcttacagacaagctgtgaccgtctccgggagctgcatgtgtcagaggttttcaccgtcatcaccgaaacgcgcgagacgaaagggcctcgtgatacgcctatttttataggttaatgtcatgataataatggtttcttagacgtcaggtggcacttttcggggaaatgtgcgcggaacccctatttgtttatttttctaaatacattcaaatatgtatccgctcatgagacaataaccctgataaatgcttcaataatattgaaaaaggaagagtatgagtattcaacatttccgtgtcgcccttattcccttttttgcggcattttgccttcctgtttttgctcacccagaaacgctggtgaaagtaaaagatgctgaagatcagttgggtgcacgagtgggttacatcgaactggatctcaacagcggtaagatccttgagagttttcgccccgaagaacgttttccaatgatgagcacttttaaagttctgctatgtggcgcggtattatcccgtattgacgccgggcaagagcaactcggtcgccgcatacactattctcagaatgacttggttgagtactcaccagtcacagaaaagcatcttacggatggcatgacagtaagagaattatgcagtgctgccataaccatgagtgataacactgcggccaacttacttctgacaacgatcggaggaccgaaggagctaaccgc

SEQ ID NO: 174 - DNA, 10613 bp, synthetic construct
  misc_feature 1..10613: note = V56 DNA
  source 1..10613: mol_type = other DNA
attaatctagaaccggtccagccaccatgaaccatgaccaggaatttgaccccccaaaggtttacccacctgtgccagctgagaagaggaagcccatccgcgtgctgtctctctttgatgggattgctacagggctcctggtgctgaaggacctgggcatccaagtggaccgctacattgcctccgaggtgtgtgaggactccatcacggtgggcatggtgcggcaccagggaaagatcatgtacgtcggggacgtccgcagcgtcacacagaagcatatccaggagtggggcccattcgacctggtgattggaggcagtccctgcaatgacctctccattgtcaaccctgcccgcaagggactttatgagggtactggccgcctcttctttgagttctaccgcctcctgcatgatgcgcggcccaaggagggagatgatcgccccttcttctggctctttgagaatgtggtggccatgggcgttagtgacaagagggacatctcgcgatttcttgagtctaaccccgtgatgattgacgccaaagaagtgtctgctgcacacagggcccgttacttctggggtaaccttcctggcatgaacaggcctttggcatccactgtgaatgataagctggagctgcaagagtgtctggagcacggcagaatagccaagttcagcaaagtgaggaccattaccaccaggtcaaactctataaagcagggcaaagaccagcatttccccgtcttcatgaacgagaaggaggacatcctgtggtgcactgaaatggaaagggtgtttggcttccccgtccactacacagacgtctccaacatgagccgcttggcgaggcagagactgctgggccgatcgtggagcgtgccggtcatccgccacctcttcgctccgctgaaggaatattttgcttgtgtgtctagcggcaatagtaacgctaacagccgcgggccgagcttcagcagcggcctggtgccgttaagcttgcgcggcagccatatgttcgaaaccgtgcctgtgtggaggagacagccagtccgggtgctgtccctttttgaagacatcaagaaagagctgacgagtttgggctttttggaaagtggttctgacccgggacaactgaagcatgtggttgatgtcacagacacagtgaggaaggatgtggaggagtggggacccttcgatcttgtgtacggcgccacacctcccctgggccacacctgtgaccgtcctcccagctggtacctgttccagttccaccggctcctgcagtacgcacggcccaagccaggcagccccaggcccttcttctggatgttcgtggacaatctggtgctgaacaaggaagacctggacgtcgcatctcgcttcctggagatggagccagtcaccatcccagatgtccacggcggatccttgcagaatgctgtccgcgtgtggagcaacatcccagccataaggagcagcaggcactgggctctggtttcggaagaagaattgtccctgctggcccagaacaagcagagctcgaagctcgcggccaagtggcccaccaagctggtgaagaactgctttctccccctaagagaatatttcaagtatttttcaggagggccgagctctggcgcacccccaccaagtggagggtctcctgccgggtccccaacatctactgaagaaggcaccagcgaatccgcaacgcccgagtcaggccctggtacctccacagaaccatctgaaggtagtgcgcctggttccccagctggaagccctacttccaccgaagaaggcacgtcaaccgaaccaagtgaaggatctgcccctgggaccagcactgaaccatctgagcggacactggtgaccttcaaggatgtatttgtggacttcaccagggaggagtggaagctgctggacactgctcagcagatcgtgtacagaaatgtgatgctggagaactataagaacctggtttccttgggttatcagcttactaagccagatgtgatcctccggttggagaagggagaagagcccggagggccgagctctggcgcacccccaccaagtggagggtctcctgccgggtccccaacatctactgaagaaggcaccagcgaatccgcaacgcccgagtcaggccctggtacctccacagaaccatctgaaggtagtgcgcctggttccccagctggaagccctacttccaccgaagaaggcacgtcaaccgaaccaagtgaaggatctgcccctgggaccagcactgaaccatctgagccaaaaaagaagagaaaggtaaacaattcccagggaagagtgaccttcgaggatgtcactgtgaacttcacccagggggagtggcagcggctgaatcccgaacagagaaacttgtacagggatgtgatgctggagaattacagcaaccttgtctctgtgggacaaggggaaaccaccaaacccgatgtgatcttgaggttggaacaaggaaaggagccatggttggaggaagaggaagtgctgggaagtggccgtgcagaaaaaaatggggacattggagggcagatttggaagccaaaggatgtgaaagagagtctcggagggccgagctctggcgcacccccaccaagtggagggtctcctgccgggtccccaacatctactgaagaaggcaccagcgaatccgcaacgcccgagtcaggccctggtacctccacagaaccatctgaaggtagtgcgcctggttccccagctggaagccctacttccaccgaagaaggcacgtcaaccgaaccaagtgaaggatctgcccctgggaccagcactgaaccatctgagccaaaaaagaagagaaaggtaatggacaagaagtacagcatcggcctggccatcggcaccaactctgtgggctgggccgtgatcaccgacgagtacaaggtgcccagcaagaaattcaaggtgctgggcaacaccgaccggcacagcatcaagaagaacctgatcggcgccctgctgttcgacagcggagaaacagccgaggccacccggctgaagagaaccgccagaagaagatacaccagacggaagaaccggatctgctatctgcaagagatcttcagcaacgagatggccaaggtggacgacagcttcttccacagactggaagagtccttcctggtggaagaggataagaagcacgagcggcaccccatcttcggcaacatcgtggacgaggtggcctaccacgagaagtaccccaccatctaccacctgagaaagaaactggtggacagcaccgacaaggccgacctgcggctgatctatctggccctggcccacatgatcaagttccggggccacttcctgatcgagggcgacctgaaccccgacaacagcgacgtggacaagctgttcatccagctggtgcagacctacaaccagctgttcgaggaaaaccccatcaacgccagcggcgtggacgccaaggccatcctgtctgccagactgagcaagagcagacggctggaaaatctgatcgcccagctgcccggcgagaagaagaatggcctgttcggcaacctgattgccctgagcctgggcctgacccccaacttcaagagcaacttcgacctggccgaggatgccaaactgcagctgagcaaggacacctacgacgacgacctggacaacctgctggcccagatcggcgaccagtacgccgacctgtttctggccgccaagaacctgtccgacgccatcctgctgagcgacatcctgagagtgaacaccgagatcaccaaggcccccctgagcgcctctatgatcaagagatacgacgagcaccaccaggacctgaccctgctgaaagctctcgtgcggcagcagctgcctgagaagtacaaagagattttcttcgaccagagcaagaacggctacgccggctacatcgatggcggagccagccaggaagagttctacaagttcatcaagcccatcctggaaaagatggacggcaccgaggaactgctcgtgaagctgaacagagaggacctgctgcggaagcagcggaccttcgacaacggcagcatcccccaccagatccacctgggagagctgcacgccattctgcggcggcaggaagatttttacccattcctgaaggacaaccgggaaaagatcgagaagatcctgaccttccgcatcccctactacgtgggccctctggccaggggaaacagcagattcgcctggatgaccagaaagagcgaggaaaccatcaccccctggaacttcgaggaagtggtggacaagggcgccagcgcccagagcttcatcgagcggatgaccaacttcgataagaacctgcccaacgagaaggtgctgcccaagcacagcctgctgtacgagtacttcaccgtgtacaacgagctgaccaaagtgaaatacgtgaccgagggaatgagaaagcccgccttcctgagcggcgagcagaaaaaagccatcgtggacctgctgttcaagaccaaccggaaagtgaccgtgaagcagctgaaagaggactacttcaagaaaatcgagtgcttcgactccgtggaaatctccggcgtggaagatcggttcaacgcctccctgggcacataccacgatctgctgaaaattatcaaggacaaggacttcctggacaatgaggaaaacgaggacattctggaagatatcgtgctgaccctgacactgtttgaggacagagagatgatcgaggaacggctgaaaacctatgcccacctgttcgacgacaaagtgatgaagcagctgaagcggcggagatacaccggctggggcaggctgagccggaagctgatcaacggcatccgggacaagcagtccggcaagacaatcctggatttcctgaagtccgacggcttcgccaacagaaacttcatgcagctgatccacgacgacagcctgacctttaaagaggacatccagaaagcccaggtgtccggccagggcgatagcctgcacgagcacattgccaatctggccggcagccccgccattaagaagggcatcctgcagacagtgaaggtggtggacgagctcgtgaaagtgatgggccggcacaagcccgagaacatcgtgatcgaaatggccagagagaaccagaccacccagaagggacagaagaacagccgcgagagaatgaagcggatcgaagagggcatcaaagagctgggcagccagatcctgaaagaacaccccgtggaaaacacccagctgcagaacgagaagctgtacctgtactacctgcagaatgggcgggatatgtacgtggaccaggaactggacatcaaccggctgtccgactacgatgtggacgctatcgtgcctcagagctttctgaaggacgactccatcgataacaaagtgctgactcggagcgacaagaaccggggcaagagcgacaacgtgccctccgaagaggtcgtgaagaagatgaagaactactggcgccagctgctgaatgccaagctgattacccagaggaagttcgacaatctgaccaaggccgagagaggcggcctgagcgaactggataaggccggcttcatcaagagacagctggtggaaacccggcagatcacaaagcacgtggcacagatcctggactcccggatgaacactaagtacgacgagaacgacaaactgatccgggaagtgaaagtgatcaccctgaagtccaagctggtgtccgatttccggaaggatttccagttttacaaagtgcgcgagatcaacaactaccaccacgcccacgacgcctacctgaacgccgtcgtgggaaccgccctgatcaaaaagtaccctaagctggaaagcgagttcgtgtacggcgactacaaggtgtacgacgtgcggaagatgatcgccaagagcgagcaggaaatcggcaaggctaccgccaagtacttcttctacagcaacatcatgaactttttcaagaccgagattaccctggccaacggcgagatccggaagcggcctctgatcgagacaaacggcgaaacaggcgagatcgtgtgggataagggccgggactttgccaccgtgcggaaagtgctgtctatgccccaagtgaatatcgtgaaaaagaccgaggtgcagacaggcggcttcagcaaagagtctatcctgcccaagaggaacagcgacaagctgatcgccagaaagaaggactgggaccctaagaagtacggcggcttcgacagccccaccgtggcctattctgtgctggtggtggccaaagtggaaaagggcaagtccaagaaactgaagagtgtgaaagagctgctggggatcaccatcatggaaagaagcagcttcgagaagaatcccatcgactttctggaagccaagggctacaaagaagtgaaaaaggacctgatcatcaagctgcctaagtactccctgttcgagctggaaaacggccggaagagaatgctggcctctgccggcgaactgcagaagggaaacgaactggccctgccctccaaatatgtgaacttcctgtacctggccagccactatgagaagctgaagggctcccccgaggataatgagcagaaacagctgtttgtggaacagcacaaacactacctggacgagatcatcgagcagatcagcgagttctccaagagagtgatcctggccgacgctaatctggacaaggtgctgagcgcctacaacaagcacagagacaagcctatcagagagcaggccgagaatatcatccacctgtttaccctgaccaatctgggagcccctgccgccttcaagtactttgacaccaccatcgaccggaagaggtacaccagcaccaaagaggtgctggacgccaccctgatccaccagagcatcaccggcctgtacgagacacggatcgacctgtctcagctgggaggcgacgcctatccctatgacgtgcccgattatgccagcctgggcagcggctcccccaagaaaaaacgcaaggtggaagatcctaagaaaaagcggaaagtggacggcctcgaggctactaacttcagcctgctgaagcaggctggagacgtggaggagaaccctggacctatgcattaatgagatcccaagcacgcagcaatgcagctcaaaacgcttagcctagccacacccccacgggaaacagcagtgattaacctttagcaataaacgaaagtttaactaagctatactaaccccagggttggtcaatttcgtgccagccacaccctggtactgcatgcacgcaatgctagctgcccctttcccgtcctgggcaccccgagtctcccccgaccccgggtcccaggtatgctcccacctccacctgccccactcaccacctctgctagttccagacacctccgagacgaggaaaaaaaaaaaaaaaaaaaaaaaaaaaaaaaaaaaaaaaaaaaaaaaaaaaaaaaaaaaaaaaaaaaaaaaaaaaaaaaaaaaaaaaaaaaaaaaaaaaaaaaaaaaaaaaaaaaaaaaaaaaaaaaaaaaaaaaaaaaaaaaaaaaaaaaaaaaaaaaaaaaaaaaaaaaaaaaaaaaaaaaaaaaaaaaaaaaaaaaaaaaaaaaaaaaaaaaaaaaaaaaaaaaaaaaaaaaaaaaaaaaaaaaaaaaaaaaaaaaaaaaaaaaaaaaaaaaaaaaaaaaaaaaaaaaaaaaaaaaaaaaaaaaaaaaaaaaaaaaaaaaaaaaaaaaaaaaaaaaaaaaaaaaaaaaaaaaaaaaaaaaaaaaaaaaaaaaaaaaaaaaaaaaaaaaaaaccgtcttcaagctttctagaaattcactggccgtcgttttacaacgtcgtgactgggaaaaccctggcgttacccaacttaatcgccttgcagcacatccccctttcgccagctggcgtaatagcgaagaggcccgcaccgatcgcccttcccaacagttgcgcagcctgaatggcgaatggcgcctgatgcggtattttctccttacgcatctgtgcggtatttcacaccgcatatggtgcactctcagtacaatctgctctgatgccgcatagttaagccagccccgacacccgccaacacccgctgacgcgccctgacgggcttgtctgctcccggcatccgcttacagacaagctgtgaccgtctccgggagctgcatgtgtcagaggttttcaccgtcatcaccgaaacgcgcgagacgaaagggcctcgtgatacgcctatttttataggttaatgtcatgataataatggtttcttagacgtcaggtggcacttttcggggaaatgtgcgcggaacccctatttgtttatttttctaaatacattcaaatatgtatccgctcatgagacaataaccctgataaatgcttcaataatattgaaaaaggaagagtatgagtattcaacatttccgtgtcgcccttattcccttttttgcggcattttgccttcctgtttttgctcacccagaaacgctggtgaaagtaaaagatgctgaagatcagttgggtgcacgagtgggttacatcgaactggatctcaacagcggtaagatccttgagagttttcgccccgaagaacgttttccaatgatgagcacttttaaagttctgctatgtggcgcggtattatcccgtattgacgccgggcaagagcaactcggtcgccgcatacactattctcagaatgacttggttgagtactcaccagtcacagaaaagcatcttacggatggcatgacagtaagagaattatgcagtgctgccataaccatgagtgataacactgcggccaacttacttctgacaacgatcggaggaccgaaggagctaaccgcttttttgcacaacatgggggatcatgtaactcgccttgatcgttgggaaccggagctgaatgaagccataccaaacgacgagcgtgacaccacgatgcctgtagcaatggcaacaacgttgcgcaaactattaactggcgaactacttactctagcttcccggcaacaattaatagactggatggaggcggataaagttgcaggaccacttctgcgctcggcccttccggctggctggtttattgctgataaatctggagccggtgagcgtgggtctcgcggtatcattgcagcactggggccagatggtaagccctcccgtatcgtagttatctacacgacggggagtcaggcaactatggatgaacgaaatagacagatcgctgagataggtgcctcactgattaagcattggtaactgtcagaccaagtttactcatatatactttagattgatttaaaacttcatttttaatttaaaaggatctaggtgaagatcctttttgataatctcatgaccaaaatcccttaacgtgagttttcgttccactgagcgtcagaccccgtagaaaagatcaaaggatcttcttgagatcctttttttctgcgcgtaatctgctgcttgcaaacaaaaaaaccaccgctaccagcggtggtttgtttgccggatcaagagctaccaactctttttccgaaggtaactggcttcagcagagcgcagataccaaatactgttcttctagtgtagccgtagttaggccaccacttcaagaactctgtagcaccgcctacatacctcgctctgctaatcctgttaccagtggctgctgccagtggcgataagtcgtgtcttaccgggttggactcaagacgatagttaccggataaggcgcagcggtcgggctgaacggggggttcgtgcacacagcccagcttggagcgaacgacctacaccgaactgagatacctacagcgtgagctatgagaaagcgccacgcttcccgaagggagaaaggcggacaggtatccggtaagcggcagggtcggaacaggagagcgcacgagggagcttccagggggaaacgcctggtatctttatagtcctgtcgggtttcgccacctctgacttgagcgtcgatttttgtgatgctcgtcaggggggcggagcctatggaaaaacgccagcaacgcggcctttttacggttcctggccttttgctggccttttgctcacatgttctttcctgcgttatcccctgattctgtggataaccgtattaccgcctttgagtgagctgataccgctcgccgcagccgaacgaccgagcgcagcgagtcagtgagcgaggaagcggaagagcgcccaatacgcaaaccgcctctccccgcgcgttggccgattcattaatgcagctggcacgacaggtttcccgactggaaagcgggcagtgagcgcaacgcaattaatgtgagttagctcactcattaggcaccccaggctttacactttatgcttccggctcgtatgttgtgtggaattgtgagcggataacaatttcacacaggaaacagctatgaccatgattacgcctctagaaagctttaatacgactcactataaggactcactatttgttttcgcgcccagttgcaaaaagtgtcgacatttgcttctgacacaactgtgttcactagcaacctcaaacagacacctta

SEQ ID NO: 175 - DNA, 11439 bp, synthetic construct
  misc_feature 1..11439: note = V57 DNA
  source 1..11439: mol_type = other DNA
atcgtgctgaccctgacactgtttgaggacagagagatgatcgaggaacggctgaaaacctatgcccacctgttcgacgacaaagtgatgaagcagctgaagcggcggagatacaccggctggggcaggctgagccggaagctgatcaacggcatccgggacaagcagtccggcaagacaatcctggatttcctgaagtccgacggcttcgccaacagaaacttcatgcagctgatccacgacgacagcctgacctttaaagaggacatccagaaagcccaggtgtccggccagggcgatagcctgcacgagcacattgccaatctggccggcagccccgccattaagaagggcatcctgcagacagtgaaggtggtggacgagctcgtgaaagtgatgggccggcacaagcccgagaacatcgtgatcgaaatggccagagagaaccagaccacccagaagggacagaagaacagccgcgagagaatgaagcggatcgaagagggcatcaaagagctgggcagccagatcctgaaagaacaccccgtggaaaacacccagctgcagaacgagaagctgtacctgtactacctgcagaatgggcgggatatgtacgtggaccaggaactggacatcaaccggctgtccgactacgatgtggacgctatcgtgcctcagagctttctgaaggacgactccatcgataacaaagtgctgactcggagcgacaagaaccggggcaagagcgacaacgtgccctccgaagaggtcgtgaagaagatgaagaactactggcgccagctgctgaatgccaagctgattacccagaggaagttcgacaatctgaccaaggccgagagaggcggcctgagcgaactggataaggccggcttcatcaagagacagctggtggaaacccggcagatcacaaagcacgtggcacagatcctggactcccggatgaacactaagtacgacgagaacgacaaactgatccgggaagtgaaagtgatcaccctgaagtccaagctggtgtccgatttccggaaggatttccagttttacaaagtgcgcgagatcaacaactaccaccacgcccacgacgcctacctgaacgccgtcgtgggaaccgccctgatcaaaaagtaccctaagctggaaagcgagttcgtgtacggcgactacaaggtgtacgacgtgcggaagatgatcgccaagagcgagcaggaaatcggcaaggctaccgccaagtacttcttctacagcaacatcatgaactttttcaagaccgagattaccctggccaacggcgagatccggaagcggcctctgatcgagacaaacggcgaaacaggcgagatcgtgtgggataagggccgggactttgccaccgtgcggaaagtgctgtctatgccccaagtgaatatcgtgaaaaagaccgaggtgcagacaggcggcttcagcaaagagtctatcctgcccaagaggaacagcgacaagctgatcgccagaaagaaggactgggaccctaagaagtacggcggcttcgacagccccaccgtggcctattctgtgctggtggtggccaaagtggaaaagggcaagtccaagaaactgaagagtgtgaaagagctgctggggatcaccatcatggaaagaagcagcttcgagaagaatcccatcgactttctggaagccaagggctacaaagaagtgaaaaaggacctgatcatcaagctgcctaagtactccctgttcgagctggaaaacggccggaagagaatgctggcctctgccggcgaactgcagaagggaaacgaactggccctgccctccaaatatgtgaacttcctgtacctggccagccactatgagaagctgaagggctcccccgaggataatgagcagaaacagctgtttgtggaacagcacaaacactacctggacgagatcatcgagcagatcagcgagttctccaagagagtgatcctggccgacgctaatctggacaaggtgctgagcgcctacaacaagcacagagacaagcctatcagagagcaggccgagaatatcatccacctgtttaccctgaccaatctgggagcccctgccgccttcaagtactttgacaccaccatcgaccggaagaggtacaccagcaccaaagaggtgctggacgccaccctgatccaccagagcatcaccggcctgtacgagacacggatcgacctgtctcagctgggaggcgacgcctatccctatgacgtgcccgattatgccagcctgggcagcggctcccccaagaaaaaacgcaaggtggaagatcctaagaaaaagcggaaagtggacggcagcggcagcgagacccccggtaccagcgagagcgccacccccgagagccggacactcggccagactgggaagaaatctgagaagggaccagtttgttggcggaagcgtgtaaaatcagagtacatgcgactgagacagctcaagaggttcagacgagctgatgaagtaaagagtatgtttagttccaatcgtcagaaaattttggaaagaacggaaatcttaaaccaagaatggaaacagcgaaggatacagcctgtgcacatcctgacttctgtgagctcattgcgcgggactagggagtgttcggtgaccagtgacttggattttccaacacaagtcatcccattaaagactctgaatgcagttgcttcagtacccataatgtattcttggtctcccctacagcagaattttatggtggaagatgaaactgttttacataacattccttatatgggagatgaagttttagatcaggatggtactttcattgaagaactaataaaaaattatgatgggaaagtacacggggatagagaatgtgggtttataaatgatgaaatttttgtggagttggtgaatgcccttggtcaatataatgatgatgacgatgatgatgatggagacgatcctgaagaaagagaagaaaagcagaaagatctggaggatcaccgagatgataaagaaagccgcccacctcggaaatttccttctgataaaatttttgaagccatttcctcaatgtttccagataagggcacagcagaagaactaaaggaaaaatataaagaactcaccgaacagcagctcccaggcgcacttcctcctgaatgtacccccaacatagatggaccaaatgctaaatctgttcagagagagcaaagcttacactcctttcatacgcttttctgtaggcgatgttttaaatatgactgcttcctacatccttttcatgcaacacccaacacttataagcggaagaacacagaaacagctctagacaacaaaccttgtggaccacagtgttaccagcatttggagggagcaaaggagtttgctgctgctctcaccgctgagcggataaagaccccaccaaaacgtccaggaggccgcagaagaggacggcttcccaataacagtagcaggcccagcacccccaccattaatgtgctggaatcaaaggatacagacagtgatagggaagcagggactgaaacggggggagagaacaatgataaagaagaagaagagaagaaagatgaaacttcgagctcctctgaagcaaattctcggtgtcaaacaccaataaagatgaagccaaatattgaacctcctgagaatgtggagtggagtggtgctgaagcctcaatgtttagagtcctcattggcacttactatgacaatttctgtgccattgctaggttaattgggaccaaaacatgtagacaggtgtatgagtttagagtcaaagaatctagcatcatagctccagctcccgctgaggatgtggatactcctccaaggaaaaagaagaggaaacaccggttgtgggctgcacactgcagaaagatacagctgaaaaaggacggctcctctaaccatgtttacaactatcaaccctgtgatcatccacggcagccttgtgacagttcgtgcccttgtgtgatagcacaaaatttttgtgaaaagttttgtcaatgtagttcagagtgtcaaaaccgctttccgggatgccgctgcaaagcacagtgcaacaccaagcagtgcccgtgctacctggctgtccgagagtgtgaccctgacctctgtcttacttgtggagccgctgaccattgggacagtaaaaatgtgtcctgcaagaactgcagtattcagcggggctccaaaaagcatctattgctggcaccatctgacgtggcaggctgggggatttttatcaaagatcctgtgcagaaaaatgaattcatctcagaatactgtggagagattatttctcaagatgaagctgacagaagagggaaagtgtatgataaatacatgtgcagctttctgttcaacttgaacaatgattttgtggtggatgcaacccgcaagggtaacaaaattcgttttgcaaatcattcggtaaatccaaactgctatgcaaaagttatgatggttaacggtgatcacaggataggtatttttgccaagagagccatccagactggcgaagagctgttttttgattacagatacagccaggctgatgccctgaagtatgtcggcatcgaaagagaaatggaaatccctgagggcagcggcgctactaacttcagcctgctgaagcaggctggagacgtggaggagaaccctggacctatgcattaatgagatcccaagcacgcagcaatgcagctcaaaacgcttagcctagccacacccccacgggaaacagcagtgattaacctttagcaataaacgaaagtttaactaagctatactaaccccagggttggtcaatttcgtgccagccacaccctggtactgcatgcacgcaatgctagctgcccctttcccgtcctgggcaccccgagtctcccccgaccccgggtcccaggtatgctcccacctccacctgccccactcaccacctctgctagttccagacacctccgagacgaggaaaaaaaaaaaaaaaaaaaaaaaaaaaaaaaaaaaaaaaaaaaaaaaaaaaaaaaaaaaaaaaaaaaaaaaaaaaaaaaaaaaaaaaaaaaaaaaaaaaaaaaaaaaaaaaaaaaaaaaaaaaaaaaaaaaaaaaaaaaaaaaaaaaaaaaaaaaaaaaaaaaaaaaaaaaaaaaaaaaaaaaaaaaaaaaaaaaaaaaaaaaaaaaaaaaaaaaaaaaaaaaaaaaaaaaaaaaaaaaaaaaaaaaaaaaaaaaaaaaaaaaaaaaaaaaaaaaaaaaaaaaaaaaaaaaaaaaaaaaaaaaaaaaaaaaaaaaaaaaaaaaaaaaaaaaaaaaaaaaaaaaaaaaaaaaaaaaaaaaaaaaaaaaaaaaaaaaaaaaaaaaaaaaaaaaaaaccgtcttcaagctttctagaaattcactggccgtcgttttacaacgtcgtgactgggaaaaccctggcgttacccaacttaatcgccttgcagcacatccccctttcgccagctggcgtaatagcgaagaggcccgcaccgatcgcccttcccaacagttgcgcagcctgaatggcgaatggcgcctgatgcggtattttctccttacgcatctgtgcggtatttcacaccgcatatggtgcactctcagtacaatctgctctgatgccgcatagttaagccagccccgacacccgccaacacccgctgacgcgccctgacgggcttgtctgctcccggcatccgcttacagacaagctgtgaccgtctccgggagctgcatgtgtcagaggttttcaccgtcatcaccgaaacgcgcgagacgaaagggcctcgtgatacgcctatttttataggttaatgtcatgataataatggtttcttagacgtcaggtggcacttttcggggaaatgtgcgcggaacccctatttgtttatttttctaaatacattcaaatatgtatccgctcatgagacaataaccctgataaatgcttcaataatattgaaaaaggaagagtatgagtattcaacatttccgtgtcgcccttattcccttttttgcggcattttgccttcctgtttttgctcacccagaaacgctggtgaaagtaaaagatgctgaagatcagttgggtgcacgagtgggttacatcgaactggatctcaacagcggtaagatccttgagagttttcgccccgaagaacgttttccaatgatgagcacttttaaagttctgctatgtggcgcggtattatcccgtattgacgccgggcaagagcaactcggtcgccgcatacactattctcagaatgacttggttgagtactcaccagtcacagaaaagcatcttacggatggcatgacagtaagagaattatgcagtgctgccataaccatgagtgataacactgcggccaacttacttctgacaacgatcggaggaccgaaggagctaaccgcttttttgcacaacatgggggatcatgtaactcgccttgatcgttgggaaccggagctgaatgaagccataccaaacgacgagcgtgacaccacgatgcctgtagcaatggcaacaacgttgcgcaaactattaactggcgaactacttactctagcttcccggcaacaattaatagactggatggaggcggataaagttgcaggaccacttctgcgctcggcccttccggctggctggtttattgctgataaatctggagccggtgagcgtgggtctcgcggtatcattgcagcactggggccagatggtaagccctcccgtatcgtagttatctacacgacggggagtcaggcaactatggatgaacgaaatagacagatcgctgagataggtgcctcactgattaagcattggtaactgtcagaccaagtttactcatatatactttagattgatttaaaacttcatttttaatttaaaaggatctaggtgaagatcctttttgataatctcatgaccaaaatcccttaacgtgagttttcgttccactgagcgtcagaccccgtagaaaagatcaaaggatcttcttgagatcctttttttctgcgcgtaatctgctgcttgcaaacaaaaaaaccaccgctaccagcggtggtttgtttgccggatcaagagctaccaactctttttccgaaggtaactggcttcagcagagcgcagataccaaatactgttcttctagtgtagccgtagttaggccaccacttcaagaactctgtagcaccgcctacatacctcgctctgctaatcctgttaccagtggctgctgccagtggcgataagtcgtgtcttaccgggttggactcaagacgatagttaccggataaggcgcagcggtcgggctgaacggggggttcgtgcacacagcccagcttggagcgaacgacctacaccgaactgagatacctacagcgtgagctatgagaaagcgccacgcttcccgaagggagaaaggcggacaggtatccggtaagcggcagggtcggaacaggagagcgcacgagggagcttccagggggaaacgcctggtatctttatagtcctgtcgggtttcgccacctctgacttgagcgtcgatttttgtgatgctcgtcaggggggcggagcctatggaaaaacgccagcaacgcggcctttttacggttcctggccttttgctggccttttgctcacatgttctttcctgcgttatcccctgattctgtggataaccgtattaccgcctttgagtgagctgataccgctcgccgcagccgaacgaccgagcgcagcgagtcagtgagcgaggaagcggaagagcgcccaatacgcaaaccgcctctccccgcgcgttggccgattcattaatgcagctggcacgacaggtttcccgactggaaagcgggcagtgagcgcaacgcaattaatgtgagttagctcactcattaggcaccccaggctttacactttatgcttccggctcgtatgttgtgtggaattgtgagcggataacaatttcacacaggaaacagctatgaccatgattacgcctctagaaagctttaatacgactcactataaggactcactatttgttttcgcgcccagttgcaaaaagtgtcgacatttgcttctgacacaactgtgttcactagcaacctcaaacagacaccgccaccatgcctgctgctaagagagtgaaactggatggatccgccaagaccgtggcctatttctacgaccccgacgtgggcaacttccactacggagctggacaccctatgaagccccatcgcctggcattgacccatagcctggtcctgcattacggtctctataagaagatgatcgtgttcaagccataccaggcctcccaacatgacatgtgccgcttccactccgaggactacattgacttcctgcagagagtcagccccaccaatatgcaaggcttcaccaagagtcttaatgccttcaacgtaggcgatgactgcccagtgtttcccgggctctttgagttctgctcgcgttacacaggcgcatctctgcaaggagcaacccagctgaacaacaagatctgtgatattgccattaactgggctggtggtctgcaccatgccaagaagtttgaggcctctggcttctgctatgtcaacgacattgtgattggcatcctggagctgctcaagtaccaccctcgggtgctctacattgacattgacatccaccatggtgacggggttcaagaagctttctacctcactgaccgggtcatgacggtgtccttccacaaatacggaaattacttcttccctggcacaggtgacatgtatgaagtcggggcagagagtggccgctactactgtctgaacgtgcccctgcgggatggcattgatgaccagagttacaagcaccttttccagccggttatcaaccaggtagtggacttctaccaacccacgtgcattgtgctccagtgtggagctgactctctgggctgtgatcgattgggctgctttaacctcagcatccgagggcatggggaatgcgttgaatatgtcaagagcttcaatatccctctactcgtgctgggtggtggtggttatactgtccgaaatgttgcccgctgctggacatatgagacatcgctgctggtagaagaggccattagtgaggagcttccctatagtgaatacttcgagtactttgccccagacttcacacttcatccagatgtcagcacccgcatcgagaatcagaactcacgccagtatctggaccagatccgccagacaatctttgaaaacctgggagggccgagctctggcgcacccccaccaagtggagggtctcctgccgggtccccaacatctactgaagaaggcaccagcgaatccgcaacgcccgagtcaggccctggtacctccacagaaccatctgaaggtagtgcgcctggttccccagctggaagccctacttccaccgaagaaggcacgtcaaccgaaccaagtgaaggatctgcccctgggaccagcactgaaccatctgagccaaaaaagaagagaaaggtaatggacaagaagtacagcatcggcctggccatcggcaccaactctgtgggctgggccgtgatcaccgacgagtacaaggtgcccagcaagaaattcaaggtgctgggcaacaccgaccggcacagcatcaagaagaacctgatcggcgccctgctgttcgacagcggagaaacagccgaggccacccggctgaagagaaccgccagaagaagatacaccagacggaagaaccggatctgctatctgcaagagatcttcagcaacgagatggccaaggtggacgacagcttcttccacagactggaagagtccttcctggtggaagaggataagaagcacgagcggcaccccatcttcggcaacatcgtggacgaggtggcctaccacgagaagtaccccaccatctaccacctgagaaagaaactggtggacagcaccgacaaggccgacctgcggctgatctatctggccctggcccacatgatcaagttccggggccacttcctgatcgagggcgacctgaaccccgacaacagcgacgtggacaagctgttcatccagctggtgcagacctacaaccagctgttcgaggaaaaccccatcaacgccagcggcgtggacgccaaggccatcctgtctgccagactgagcaagagcagacggctggaaaatctgatcgcccagctgcccggcgagaagaagaatggcctgttcggcaacctgattgccctgagcctgggcctgacccccaacttcaagagcaacttcgacctggccgaggatgccaaactgcagctgagcaaggacacctacgacgacgacctggacaacctgctggcccagatcggcgaccagtacgccgacctgtttctggccgccaagaacctgtccgacgccatcctgctgagcgacatcctgagagtgaacaccgagatcaccaaggcccccctgagcgcctctatgatcaagagatacgacgagcaccaccaggacctgaccctgctgaaagctctcgtgcggcagcagctgcctgagaagtacaaagagattttcttcgaccagagcaagaacggctacgccggctacatcgatggcggagccagccaggaagagttctacaagttcatcaagcccatcctggaaaagatggacggcaccgaggaactgctcgtgaagctgaacagagaggacctgctgcggaagcagcggaccttcgacaacggcagcatcccccaccagatccacctgggagagctgcacgccattctgcggcggcaggaagatttttacccattcctgaaggacaaccgggaaaagatcgagaagatcctgaccttccgcatcccctactacgtgggccctctggccaggggaaacagcagattcgcctggatgaccagaaagagcgaggaaaccatcaccccctggaacttcgaggaagtggtggacaagggcgccagcgcccagagcttcatcgagcggatgaccaacttcgataagaacctgcccaacgagaaggtgctgcccaagcacagcctgctgtacgagtacttcaccgtgtacaacgagctgaccaaagtgaaatacgtgaccgagggaatgagaaagcccgccttcctgagcggcgagcagaaaaaagccatcgtggacctgctgttcaagaccaaccggaaagtgaccgtgaagcagctgaaagaggactacttcaagaaaatcgagtgcttcgactccgtggaaatctccggcgtggaagatcggttcaacgcctccctgggcacataccacgatctgctgaaaattatcaaggacaaggacttcctggacaatgaggaaaacgaggacattctggaagat

SEQ ID NO: 176 - DNA, 10530 bp, synthetic construct
  misc_feature 1..10530: note = V58 DNA
  source 1..10530: mol_type = other DNA
atcgtgctgaccctgacactgtttgaggacagagagatgatcgaggaacggctgaaaacctatgcccacctgttcgacgacaaagtgatgaagcagctgaagcggcggagatacaccggctggggcaggctgagccggaagctgatcaacggcatccgggacaagcagtccggcaagacaatcctggatttcctgaagtccgacggcttcgccaacagaaacttcatgcagctgatccacgacgacagcctgacctttaaagaggacatccagaaagcccaggtgtccggccagggcgatagcctgcacgagcacattgccaatctggccggcagccccgccattaagaagggcatcctgcagacagtgaaggtggtggacgagctcgtgaaagtgatgggccggcacaagcccgagaacatcgtgatcgaaatggccagagagaaccagaccacccagaagggacagaagaacagccgcgagagaatgaagcggatcgaagagggcatcaaagagctgggcagccagatcctgaaagaacaccccgtggaaaacacccagctgcagaacgagaagctgtacctgtactacctgcagaatgggcgggatatgtacgtggaccaggaactggacatcaaccggctgtccgactacgatgtggacgctatcgtgcctcagagctttctgaaggacgactccatcgataacaaagtgctgactcggagcgacaagaaccggggcaagagcgacaacgtgccctccgaagaggtcgtgaagaagatgaagaactactggcgccagctgctgaatgccaagctgattacccagaggaagttcgacaatctgaccaaggccgagagaggcggcctgagcgaactggataaggccggcttcatcaagagacagctggtggaaacccggcagatcacaaagcacgtggcacagatcctggactcccggatgaacactaagtacgacgagaacgacaaactgatccgggaagtgaaagtgatcaccctgaagtccaagctggtgtccgatttccggaaggatttccagttttacaaagtgcgcgagatcaacaactaccaccacgcccacgacgcctacctgaacgccgtcgtgggaaccgccctgatcaaaaagtaccctaagctggaaagcgagttcgtgtacggcgactacaaggtgtacgacgtgcggaagatgatcgccaagagcgagcaggaaatcggcaaggctaccgccaagtacttcttctacagcaacatcatgaactttttcaagaccgagattaccctggccaacggcgagatccggaagcggcctctgatcgagacaaacggcgaaacaggcgagatcgtgtgggataagggccgggactttgccaccgtgcggaaagtgctgtctatgccccaagtgaatatcgtgaaaaagaccgaggtgcagacaggcggcttcagcaaagagtctatcctgcccaagaggaacagcgacaagctgatcgccagaaagaaggactgggaccctaagaagtacggcggcttcgacagccccaccgtggcctattctgtgctggtggtggccaaagtggaaaagggcaagtccaagaaactgaagagtgtgaaagagctgctggggatcaccatcatggaaagaagcagcttcgagaagaatcccatcgactttctggaagccaagggctacaaagaagtgaaaaaggacctgatcatcaagctgcctaagtactccctgttcgagctggaaaacggccggaagagaatgctggcctctgccggcgaactgcagaagggaaacgaactggccctgccctccaaatatgtgaacttcctgtacctggccagccactatgagaagctgaagggctcccccgaggataatgagcagaaacagctgtttgtggaacagcacaaacactacctggacgagatcatcgagcagatcagcgagttctccaagagagtgatcctggccgacgctaatctggacaaggtgctgagcgcctacaacaagcacagagacaagcctatcagagagcaggccgagaatatcatccacctgtttaccctgaccaatctgggagcccctgccgccttcaagtactttgacaccaccatcgaccggaagaggtacaccagcaccaaagaggtgctggacgccaccctgatccaccagagcatcaccggcctgtacgagacacggatcgacctgtctcagctgggaggcgacgcctatccctatgacgtgcccgattatgccagcctgggcagcggctcccccaagaaaaaacgcaaggtggaagatcctaagaaaaagcggaaagtggacggcagcggcagcgagacccccggtaccagcgagagcgccacccccgagagccggacactcggccagactgggaagaaatctgagaagggaccagtttgttggcggaagcgtgtaaaatcagagtacatgcgactgagacagctcaagaggttcagacgagctgatgaagtaaagagtatgtttagttccaatcgtcagaaaattttggaaagaacggaaatcttaaaccaagaatggaaacagcgaaggatacagcctgtgcacatcctgacttctgtgagctcattgcgcgggactagggagtgttcggtgaccagtgacttggattttccaacacaagtcatcccattaaagactctgaatgcagttgcttcagtacccataatgtattcttggtctcccctacagcagaattttatggtggaagatgaaactgttttacataacattccttatatgggagatgaagttttagatcaggatggtactttcattgaagaactaataaaaaattatgatgggaaagtacacggggatagagaatgtgggtttataaatgatgaaatttttgtggagttggtgaatgcccttggtcaatataatgatgatgacgatgatgatgatggagacgatcctgaagaaagagaagaaaagcagaaagatctggaggatcaccgagatgataaagaaagccgcccacctcggaaatttccttctgataaaatttttgaagccatttcctcaatgtttccagataagggcacagcagaagaactaaaggaaaaatataaagaactcaccgaacagcagctcccaggcgcacttcctcctgaatgtacccccaacatagatggaccaaatgctaaatctgttcagagagagcaaagcttacactcctttcatacgcttttctgtaggcgatgttttaaatatgactgcttcctacatccttttcatgcaacacccaacacttataagcggaagaacacagaaacagctctagacaacaaaccttgtggaccacagtgttaccagcatttggagggagcaaaggagtttgctgctgctctcaccgctgagcggataaagaccccaccaaaacgtccaggaggccgcagaagaggacggcttcccaataacagtagcaggcccagcacccccaccattaatgtgctggaatcaaaggatacagacagtgatagggaagcagggactgaaacggggggagagaacaatgataaagaagaagaagagaagaaagatgaaacttcgagctcctctgaagcaaattctcggtgtcaaacaccaataaagatgaagccaaatattgaacctcctgagaatgtggagtggagtggtgctgaagcctcaatgtttagagtcctcattggcacttactatgacaatttctgtgccattgctaggttaattgggaccaaaacatgtagacaggtgtatgagtttagagtcaaagaatctagcatcatagctccagctcccgctgaggatgtggatactcctccaaggaaaaagaagaggaaacaccggttgtgggctgcacactgcagaaagatacagctgaaaaaggacggctcctctaaccatgtttacaactatcaaccctgtgatcatccacggcagccttgtgacagttcgtgcccttgtgtgatagcacaaaatttttgtgaaaagttttgtcaatgtagttcagagtgtcaaaaccgctttccgggatgccgctgcaaagcacagtgcaacaccaagcagtgcccgtgctacctggctgtccgagagtgtgaccctgacctctgtcttacttgtggagccgctgaccattgggacagtaaaaatgtgtcctgcaagaactgcagtattcagcggggctccaaaaagcatctattgctggcaccatctgacgtggcaggctgggggatttttatcaaagatcctgtgcagaaaaatgaattcatctcagaatactgtggagagattatttctcaagatgaagctgacagaagagggaaagtgtatgataaatacatgtgcagctttctgttcaacttgaacaatgattttgtggtggatgcaacccgcaagggtaacaaaattcgttttgcaaatcattcggtaaatccaaactgctatgcaaaagttatgatggttaacggtgatcacaggataggtatttttgccaagagagccatccagactggcgaagagctgttttttgattacagatacagccaggctgatgccctgaagtatgtcggcatcgaaagagaaatggaaatccctgagggcagcggcgctactaacttcagcctgctgaagcaggctggagacgtggaggagaaccctggacctatgcattaatgagatcccaagcacgcagcaatgcagctcaaaacgcttagcctagccacacccccacgggaaacagcagtgattaacctttagcaataaacgaaagtttaactaagctatactaaccccagggttggtcaatttcgtgccagccacaccctggtactgcatgcacgcaatgctagctgcccctttcccgtcctgggcaccccgagtctcccccgaccccgggtcccaggtatgctcccacctccacctgccccactcaccacctctgctagttccagacacctccgagacgaggaaaaaaaaaaaaaaaaaaaaaaaaaaaaaaaaaaaaaaaaaaaaaaaaaaaaaaaaaaaaaaaaaaaaaaaaaaaaaaaaaaaaaaaaaaaaaaaaaaaaaaaaaaaaaaaaaaaaaaaaaaaaaaaaaaaaaaaaaaaaaaaaaaaaaaaaaaaaaaaaaaaaaaaaaaaaaaaaaaaaaaaaaaaaaaaaaaaaaaaaaaaaaaaaaaaaaaaaaaaaaaaaaaaaaaaaaaaaaaaaaaaaaaaaaaaaaaaaaaaaaaaaaaaaaaaaaaaaaaaaaaaaaaaaaaaaaaaaaaaaaaaaaaaaaaaaaaaaaaaaaaaaaaaaaaaaaaaaaaaaaaaaaaaaaaaaaaaaaaaaaaaaaaaaaaaaaaaaaaaaaaaaaaaaaaaaaaccgtcttcaagctttctagaaattcactggccgtcgttttacaacgtcgtgactgggaaaaccctggcgttacccaacttaatcgccttgcagcacatccccctttcgccagctggcgtaatagcgaagaggcccgcaccgatcgcccttcccaacagttgcgcagcctgaatggcgaatggcgcctgatgcggtattttctccttacgcatctgtgcggtatttcacaccgcatatggtgcactctcagtacaatctgctctgatgccgcatagttaagccagccccgacacccgccaacacccgctgacgcgccctgacgggcttgtctgctcccggcatccgcttacagacaagctgtgaccgtctccgggagctgcatgtgtcagaggttttcaccgtcatcaccgaaacgcgcgagacgaaagggcctcgtgatacgcctatttttataggttaatgtcatgataataatggtttcttagacgtcaggtggcacttttcggggaaatgtgcgcggaacccctatttgtttatttttctaaatacattcaaatatgtatccgctcatgagacaataaccctgataaatgcttcaataatattgaaaaaggaagagtatgagtattcaacatttccgtgtcgcccttattcccttttttgcggcattttgccttcctgtttttgctcacccagaaacgctggtgaaagtaaaagatgctgaagatcagttgggtgcacgagtgggttacatcgaactggatctcaacagcggtaagatccttgagagttttcgccccgaagaacgttttccaatgatgagcacttttaaagttctgctatgtggcgcggtattatcccgtattgacgccgggcaagagcaactcggtcgccgcatacactattctcagaatgacttggttgagtactcaccagtcacagaaaagcatcttacggatggcatgacagtaagagaattatgcagtgctgccataaccatgagtgataacactgcggccaacttacttctgacaacgatcggaggaccgaaggagctaaccgcttttttgcacaacatgggggatcatgtaactcgccttgatcgttgggaaccggagctgaatgaagccataccaaacgacgagcgtgacaccacgatgcctgtagcaatggcaacaacgttgcgcaaactattaactggcgaactacttactctagcttcccggcaacaattaatagactggatggaggcggataaagttgcaggaccacttctgcgctcggcccttccggctggctggtttattgctgataaatctggagccggtgagcgtgggtctcgcggtatcattgcagcactggggccagatggtaagccctcccgtatcgtagttatctacacgacggggagtcaggcaactatggatgaacgaaatagacagatcgctgagataggtgcctcactgattaagcattggtaactgtcagaccaagtttactcatatatactttagattgatttaaaacttcatttttaatttaaaaggatctaggtgaagatcctttttgataatctcatgaccaaaatcccttaacgtgagttttcgttccactgagcgtcagaccccgtagaaaagatcaaaggatcttcttgagatcctttttttctgcgcgtaatctgctgcttgcaaacaaaaaaaccaccgctaccagcggtggtttgtttgccggatcaagagctaccaactctttttccgaaggtaactggcttcagcagagcgcagataccaaatactgttcttctagtgtagccgtagttaggccaccacttcaagaactctgtagcaccgcctacatacctcgctctgctaatcctgttaccagtggctgctgccagtggcgataagtcgtgtcttaccgggttggactcaagacgatagttaccggataaggcgcagcggtcgggctgaacggggggttcgtgcacacagcccagcttggagcgaacgacctacaccgaactgagatacctacagcgtgagctatgagaaagcgccacgcttcccgaagggagaaaggcggacaggtatccggtaagcggcagggtcggaacaggagagcgcacgagggagcttccagggggaaacgcctggtatctttatagtcctgtcgggtttcgccacctctgacttgagcgtcgatttttgtgatgctcgtcaggggggcggagcctatggaaaaacgccagcaacgcggcctttttacggttcctggccttttgctggccttttgctcacatgttctttcctgcgttatcccctgattctgtggataaccgtattaccgcctttgagtgagctgataccgctcgccgcagccgaacgaccgagcgcagcgagtcagtgagcgaggaagcggaagagcgcccaatacgcaaaccgcctctccccgcgcgttggccgattcattaatgcagctggcacgacaggtttcccgactggaaagcgggcagtgagcgcaacgcaattaatgtgagttagctcactcattaggcaccccaggctttacactttatgcttccggctcgtatgttgtgtggaattgtgagcggataacaatttcacacaggaaacagctatgaccatgattacgcctctagaaagctttaatacgactcactataaggactcactatttgttttcgcgcccagttgcaaaaagtgtcgacatttgcttctgacacaactgtgttcactagcaacctcaaacagacaccgccaccatgcctgctgctaagagagtgaaactggatggatcccggacactggtgaccttcaaggatgtatttgtggacttcaccagggaggagtggaagctgctggacactgctcagcagatcgtgtacagaaatgtgatgctggagaactataagaacctggtttccttgggttatcagcttactaagccagatgtgatcctccggttggagaagggagaagagcccggagggccgagctctggcgcacccccaccaagtggagggtctcctgccgggtccccaacatctactgaagaaggcaccagcgaatccgcaacgcccgagtcaggccctggtacctccacagaaccatctgaaggtagtgcgcctggttccccagctggaagccctacttccaccgaagaaggcacgtcaaccgaaccaagtgaaggatctgcccctgggaccagcactgaaccatctgagccaaaaaagaagagaaaggtaatggacaagaagtacagcatcggcctggccatcggcaccaactctgtgggctgggccgtgatcaccgacgagtacaaggtgcccagcaagaaattcaaggtgctgggcaacaccgaccggcacagcatcaagaagaacctgatcggcgccctgctgttcgacagcggagaaacagccgaggccacccggctgaagagaaccgccagaagaagatacaccagacggaagaaccggatctgctatctgcaagagatcttcagcaacgagatggccaaggtggacgacagcttcttccacagactggaagagtccttcctggtggaagaggataagaagcacgagcggcaccccatcttcggcaacatcgtggacgaggtggcctaccacgagaagtaccccaccatctaccacctgagaaagaaactggtggacagcaccgacaaggccgacctgcggctgatctatctggccctggcccacatgatcaagttccggggccacttcctgatcgagggcgacctgaaccccgacaacagcgacgtggacaagctgttcatccagctggtgcagacctacaaccagctgttcgaggaaaaccccatcaacgccagcggcgtggacgccaaggccatcctgtctgccagactgagcaagagcagacggctggaaaatctgatcgcccagctgcccggcgagaagaagaatggcctgttcggcaacctgattgccctgagcctgggcctgacccccaacttcaagagcaacttcgacctggccgaggatgccaaactgcagctgagcaaggacacctacgacgacgacctggacaacctgctggcccagatcggcgaccagtacgccgacctgtttctggccgccaagaacctgtccgacgccatcctgctgagcgacatcctgagagtgaacaccgagatcaccaaggcccccctgagcgcctctatgatcaagagatacgacgagcaccaccaggacctgaccctgctgaaagctctcgtgcggcagcagctgcctgagaagtacaaagagattttcttcgaccagagcaagaacggctacgccggctacatcgatggcggagccagccaggaagagttctacaagttcatcaagcccatcctggaaaagatggacggcaccgaggaactgctcgtgaagctgaacagagaggacctgctgcggaagcagcggaccttcgacaacggcagcatcccccaccagatccacctgggagagctgcacgccattctgcggcggcaggaagatttttacccattcctgaaggacaaccgggaaaagatcgagaagatcctgaccttccgcatcccctactacgtgggccctctggccaggggaaacagcagattcgcctggatgaccagaaagagcgaggaaaccatcaccccctggaacttcgaggaagtggtggacaagggcgccagcgcccagagcttcatcgagcggatgaccaacttcgataagaacctgcccaacgagaaggtgctgcccaagcacagcctgctgtacgagtacttcaccgtgtacaacgagctgaccaaagtgaaatacgtgaccgagggaatgagaaagcccgccttcctgagcggcgagcagaaaaaagccatcgtggacctgctgttcaagaccaaccggaaagtgaccgtgaagcagctgaaagaggactacttcaagaaaatcgagtgcttcgactccgtggaaatctccggcgtggaagatcggttcaacgcctccctgggcacataccacgatctgctgaaaattatcaaggacaaggacttcctggacaatgaggaaaacgaggacattctggaagat

SEQ ID NO: 177 - DNA, 11676 bp, synthetic construct
  misc_feature 1..11676: note = V59 DNA
  source 1..11676: mol_type = other DNA
atcgtgctgaccctgacactgtttgaggacagagagatgatcgaggaacggctgaaaacctatgcccacctgttcgacgacaaagtgatgaagcagctgaagcggcggagatacaccggctggggcaggctgagccggaagctgatcaacggcatccgggacaagcagtccggcaagacaatcctggatttcctgaagtccgacggcttcgccaacagaaacttcatgcagctgatccacgacgacagcctgacctttaaagaggacatccagaaagcccaggtgtccggccagggcgatagcctgcacgagcacattgccaatctggccggcagccccgccattaagaagggcatcctgcagacagtgaaggtggtggacgagctcgtgaaagtgatgggccggcacaagcccgagaacatcgtgatcgaaatggccagagagaaccagaccacccagaagggacagaagaacagccgcgagagaatgaagcggatcgaagagggcatcaaagagctgggcagccagatcctgaaagaacaccccgtggaaaacacccagctgcagaacgagaagctgtacctgtactacctgcagaatgggcgggatatgtacgtggaccaggaactggacatcaaccggctgtccgactacgatgtggacgctatcgtgcctcagagctttctgaaggacgactccatcgataacaaagtgctgactcggagcgacaagaaccggggcaagagcgacaacgtgccctccgaagaggtcgtgaagaagatgaagaactactggcgccagctgctgaatgccaagctgattacccagaggaagttcgacaatctgaccaaggccgagagaggcggcctgagcgaactggataaggccggcttcatcaagagacagctggtggaaacccggcagatcacaaagcacgtggcacagatcctggactcccggatgaacactaagtacgacgagaacgacaaactgatccgggaagtgaaagtgatcaccctgaagtccaagctggtgtccgatttccggaaggatttccagttttacaaagtgcgcgagatcaacaactaccaccacgcccacgacgcctacctgaacgccgtcgtgggaaccgccctgatcaaaaagtaccctaagctggaaagcgagttcgtgtacggcgactacaaggtgtacgacgtgcggaagatgatcgccaagagcgagcaggaaatcggcaaggctaccgccaagtacttcttctacagcaacatcatgaactttttcaagaccgagattaccctggccaacggcgagatccggaagcggcctctgatcgagacaaacggcgaaacaggcgagatcgtgtgggataagggccgggactttgccaccgtgcggaaagtgctgtctatgccccaagtgaatatcgtgaaaaagaccgaggtgcagacaggcggcttcagcaaagagtctatcctgcccaagaggaacagcgacaagctgatcgccagaaagaaggactgggaccctaagaagtacggcggcttcgacagccccaccgtggcctattctgtgctggtggtggccaaagtggaaaagggcaagtccaagaaactgaagagtgtgaaagagctgctggggatcaccatcatggaaagaagcagcttcgagaagaatcccatcgactttctggaagccaagggctacaaagaagtgaaaaaggacctgatcatcaagctgcctaagtactccctgttcgagctggaaaacggccggaagagaatgctggcctctgccggcgaactgcagaagggaaacgaactggccctgccctccaaatatgtgaacttcctgtacctggccagccactatgagaagctgaagggctcccccgaggataatgagcagaaacagctgtttgtggaacagcacaaacactacctggacgagatcatcgagcagatcagcgagttctccaagagagtgatcctggccgacgctaatctggacaaggtgctgagcgcctacaacaagcacagagacaagcctatcagagagcaggccgagaatatcatccacctgtttaccctgaccaatctgggagcccctgccgccttcaagtactttgacaccaccatcgaccggaagaggtacaccagcaccaaagaggtgctggacgccaccctgatccaccagagcatcaccggcctgtacgagacacggatcgacctgtctcagctgggaggcgacgcctatccctatgacgtgcccgattatgccagcctgggcagcggctcccccaagaaaaaacgcaaggtggaagatcctaagaaaaagcggaaagtggacggcagcggcagcgagacccccggtaccagcgagagcgccacccccgagagccggacactcggccagactgggaagaaatctgagaagggaccagtttgttggcggaagcgtgtaaaatcagagtacatgcgactgagacagctcaagaggttcagacgagctgatgaagtaaagagtatgtttagttccaatcgtcagaaaattttggaaagaacggaaatcttaaaccaagaatggaaacagcgaaggatacagcctgtgcacatcctgacttctgtgagctcattgcgcgggactagggagtgttcggtgaccagtgacttggattttccaacacaagtcatcccattaaagactctgaatgcagttgcttcagtacccataatgtattcttggtctcccctacagcagaattttatggtggaagatgaaactgttttacataacattccttatatgggagatgaagttttagatcaggatggtactttcattgaagaactaataaaaaattatgatgggaaagtacacggggatagagaatgtgggtttataaatgatgaaatttttgtggagttggtgaatgcccttggtcaatataatgatgatgacgatgatgatgatggagacgatcctgaagaaagagaagaaaagcagaaagatctggaggatcaccgagatgataaagaaagccgcccacctcggaaatttccttctgataaaatttttgaagccatttcctcaatgtttccagataagggcacagcagaagaactaaaggaaaaatataaagaactcaccgaacagcagctcccaggcgcacttcctcctgaatgtacccccaacatagatggaccaaatgctaaatctgttcagagagagcaaagcttacactcctttcatacgcttttctgtaggcgatgttttaaatatgactgcttcctacatccttttcatgcaacacccaacacttataagcggaagaacacagaaacagctctagacaacaaaccttgtggaccacagtgttaccagcatttggagggagcaaaggagtttgctgctgctctcaccgctgagcggataaagaccccaccaaaacgtccaggaggccgcagaagaggacggcttcccaataacagtagcaggcccagcacccccaccattaatgtgctggaatcaaaggatacagacagtgatagggaagcagggactgaaacggggggagagaacaatgataaagaagaagaagagaagaaagatgaaacttcgagctcctctgaagcaaattctcggtgtcaaacaccaataaagatgaagccaaatattgaacctcctgagaatgtggagtggagtggtgctgaagcctcaatgtttagagtcctcattggcacttactatgacaatttctgtgccattgctaggttaattgggaccaaaacatgtagacaggtgtatgagtttagagtcaaagaatctagcatcatagctccagctcccgctgaggatgtggatactcctccaaggaaaaagaagaggaaacaccggttgtgggctgcacactgcagaaagatacagctgaaaaaggacggctcctctaaccatgtttacaactatcaaccctgtgatcatccacggcagccttgtgacagttcgtgcccttgtgtgatagcacaaaatttttgtgaaaagttttgtcaatgtagttcagagtgtcaaaaccgctttccgggatgccgctgcaaagcacagtgcaacaccaagcagtgcccgtgctacctggctgtccgagagtgtgaccctgacctctgtcttacttgtggagccgctgaccattgggacagtaaaaatgtgtcctgcaagaactgcagtattcagcggggctccaaaaagcatctattgctggcaccatctgacgtggcaggctgggggatttttatcaaagatcctgtgcagaaaaatgaattcatctcagaatactgtggagagattatttctcaagatgaagctgacagaagagggaaagtgtatgataaatacatgtgcagctttctgttcaacttgaacaatgattttgtggtggatgcaacccgcaagggtaacaaaattcgttttgcaaatcattcggtaaatccaaactgctatgcaaaagttatgatggttaacggtgatcacaggataggtatttttgccaagagagccatccagactggcgaagagctgttttttgattacagatacagccaggctgatgccctgaagtatgtcggcatcgaaagagaaatggaaatccctgagggcagcggcgctactaacttcagcctgctgaagcaggctggagacgtggaggagaaccctggacctatgcattaatgagatcccaagcacgcagcaatgcagctcaaaacgcttagcctagccacacccccacgggaaacagcagtgattaacctttagcaataaacgaaagtttaactaagctatactaaccccagggttggtcaatttcgtgccagccacaccctggtactgcatgcacgcaatgctagctgcccctttcccgtcctgggcaccccgagtctcccccgaccccgggtcccaggtatgctcccacctccacctgccccactcaccacctctgctagttccagacacctccgagacgaggaaaaaaaaaaaaaaaaaaaaaaaaaaaaaaaaaaaaaaaaaaaaaaaaaaaaaaaaaaaaaaaaaaaaaaaaaaaaaaaaaaaaaaaaaaaaaaaaaaaaaaaaaaaaaaaaaaaaaaaaaaaaaaaaaaaaaaaaaaaaaaaaaaaaaaaaaaaaaaaaaaaaaaaaaaaaaaaaaaaaaaaaaaaaaaaaaaaaaaaaaaaaaaaaaaaaaaaaaaaaaaaaaaaaaaaaaaaaaaaaaaaaaaaaaaaaaaaaaaaaaaaaaaaaaaaaaaaaaaaaaaaaaaaaaaaaaaaaaaaaaaaaaaaaaaaaaaaaaaaaaaaaaaaaaaaaaaaaaaaaaaaaaaaaaaaaaaaaaaaaaaaaaaaaaaaaaaaaaaaaaaaaaaaaaaaaaaccgtcttcaagctttctagaaattcactggccgtcgttttacaacgtcgtgactgggaaaaccctggcgttacccaacttaatcgccttgcagcacatccccctttcgccagctggcgtaatagcgaagaggcccgcaccgatcgcccttcccaacagttgcgcagcctgaatggcgaatggcgcctgatgcggtattttctccttacgcatctgtgcggtatttcacaccgcatatggtgcactctcagtacaatctgctctgatgccgcatagttaagccagccccgacacccgccaacacccgctgacgcgccctgacgggcttgtctgctcccggcatccgcttacagacaagctgtgaccgtctccgggagctgcatgtgtcagaggttttcaccgtcatcaccgaaacgcgcgagacgaaagggcctcgtgatacgcctatttttataggttaatgtcatgataataatggtttcttagacgtcaggtggcacttttcggggaaatgtgcgcggaacccctatttgtttatttttctaaatacattcaaatatgtatccgctcatgagacaataaccctgataaatgcttcaataatattgaaaaaggaagagtatgagtattcaacatttccgtgtcgcccttattcccttttttgcggcattttgccttcctgtttttgctcacccagaaacgctggtgaaagtaaaagatgctgaagatcagttgggtgcacgagtgggttacatcgaactggatctcaacagcggtaagatccttgagagttttcgccccgaagaacgttttccaatgatgagcacttttaaagttctgctatgtggcgcggtattatcccgtattgacgccgggcaagagcaactcggtcgccgcatacactattctcagaatgacttggttgagtactcaccagtcacagaaaagcatcttacggatggcatgacagtaagagaattatgcagtgctgccataaccatgagtgataacactgcggccaacttacttctgacaacgatcggaggaccgaaggagctaaccgcttttttgcacaacatgggggatcatgtaactcgccttgatcgttgggaaccggagctgaatgaagccataccaaacgacgagcgtgacaccacgatgcctgtagcaatggcaacaacgttgcgcaaactattaactggcgaactacttactctagcttcccggcaacaattaatagactggatggaggcggataaagttgcaggaccacttctgcgctcggcccttccggctggctggtttattgctgataaatctggagccggtgagcgtgggtctcgcggtatcattgcagcactggggccagatggtaagccctcccgtatcgtagttatctacacgacggggagtcaggcaactatggatgaacgaaatagacagatcgctgagataggtgcctcactgattaagcattggtaactgtcagaccaagtttactcatatatactttagattgatttaaaacttcatttttaatttaaaaggatctaggtgaagatcctttttgataatctcatgaccaaaatcccttaacgtgagttttcgttccactgagcgtcagaccccgtagaaaagatcaaaggatcttcttgagatcctttttttctgcgcgtaatctgctgcttgcaaacaaaaaaaccaccgctaccagcggtggtttgtttgccggatcaagagctaccaactctttttccgaaggtaactggcttcagcagagcgcagataccaaatactgttcttctagtgtagccgtagttaggccaccacttcaagaactctgtagcaccgcctacatacctcgctctgctaatcctgttaccagtggctgctgccagtggcgataagtcgtgtcttaccgggttggactcaagacgatagttaccggataaggcgcagcggtcgggctgaacggggggttcgtgcacacagcccagcttggagcgaacgacctacaccgaactgagatacctacagcgtgagctatgagaaagcgccacgcttcccgaagggagaaaggcggacaggtatccggtaagcggcagggtcggaacaggagagcgcacgagggagcttccagggggaaacgcctggtatctttatagtcctgtcgggtttcgccacctctgacttgagcgtcgatttttgtgatgctcgtcaggggggcggagcctatggaaaaacgccagcaacgcggcctttttacggttcctggccttttgctggccttttgctcacatgttctttcctgcgttatcccctgattctgtggataaccgtattaccgcctttgagtgagctgataccgctcgccgcagccgaacgaccgagcgcagcgagtcagtgagcgaggaagcggaagagcgcccaatacgcaaaccgcctctccccgcgcgttggccgattcattaatgcagctggcacgacaggtttcccgactggaaagcgggcagtgagcgcaacgcaattaatgtgagttagctcactcattaggcaccccaggctttacactttatgcttccggctcgtatgttgtgtggaattgtgagcggataacaatttcacacaggaaacagctatgaccatgattacgcctctagaaagctttaatacgactcactataaggactcactatttgttttcgcgcccagttgcaaaaagtgtcgacatttgcttctgacacaactgtgttcactagcaacctcaaacagacaccgccaccatgcctgctgctaagagagtgaaactggatggatcccggacactggtgaccttcaaggatgtatttgtggacttcaccagggaggagtggaagctgctggacactgctcagcagatcgtgtacagaaatgtgatgctggagaactataagaacctggtttccttgggttatcagcttactaagccagatgtgatcctccggttggagaagggagaagagcccggagggccgagctctggcgcacccccaccaagtggagggtctcctgccgggtccccaacatctactgaagaaggcaccagcgaatccgcaacgcccgagtcaggccctggtacctccacagaaccatctgaaggtagtgcgcctggttccccagctggaagccctacttccaccgaagaaggcacgtcaaccgaaccaagtgaaggatctgcccctgggaccagcactgaaccatctgagatgaaccatgaccaggaatttgaccccccaaaggtttacccacctgtgccagctgagaagaggaagcccatccgcgtgctgtctctctttgatgggattgctacagggctcctggtgctgaaggacctgggcatccaagtggaccgctacattgcctccgaggtgtgtgaggactccatcacggtgggcatggtgcggcaccagggaaagatcatgtacgtcggggacgtccgcagcgtcacacagaagcatatccaggagtggggcccattcgacctggtgattggaggcagtccctgcaatgacctctccattgtcaaccctgcccgcaagggactttatgagggtactggccgcctcttctttgagttctaccgcctcctgcatgatgcgcggcccaaggagggagatgatcgccccttcttctggctctttgagaatgtggtggccatgggcgttagtgacaagagggacatctcgcgatttcttgagtctaaccccgtgatgattgacgccaaagaagtgtctgctgcacacagggcccgttacttctggggtaaccttcctggcatgaacaggcctttggcatccactgtgaatgataagctggagctgcaagagtgtctggagcacggcagaatagccaagttcagcaaagtgaggaccattaccaccaggtcaaactctataaagcagggcaaagaccagcatttccccgtcttcatgaacgagaaggaggacatcctgtggtgcactgaaatggaaagggtgtttggcttccccgtccactacacagacgtctccaacatgagccgcttggcgaggcagagactgctgggccgatcgtggagcgtgccggtcatccgccacctcttcgctccgctgaaggaatattttgcttgtgtgggagggccgagctctggcgcacccccaccaagtggagggtctcctgccgggtccccaacatctactgaagaaggcaccagcgaatccgcaacgcccgagtcaggccctggtacctccacagaaccatctgaaggtagtgcgcctggttccccagctggaagccctacttccaccgaagaaggcacgtcaaccgaaccaagtgaaggatctgcccctgggaccagcactgaaccatctgagccaaaaaagaagagaaaggtaatggacaagaagtacagcatcggcctggccatcggcaccaactctgtgggctgggccgtgatcaccgacgagtacaaggtgcccagcaagaaattcaaggtgctgggcaacaccgaccggcacagcatcaagaagaacctgatcggcgccctgctgttcgacagcggagaaacagccgaggccacccggctgaagagaaccgccagaagaagatacaccagacggaagaaccggatctgctatctgcaagagatcttcagcaacgagatggccaaggtggacgacagcttcttccacagactggaagagtccttcctggtggaagaggataagaagcacgagcggcaccccatcttcggcaacatcgtggacgaggtggcctaccacgagaagtaccccaccatctaccacctgagaaagaaactggtggacagcaccgacaaggccgacctgcggctgatctatctggccctggcccacatgatcaagttccggggccacttcctgatcgagggcgacctgaaccccgacaacagcgacgtggacaagctgttcatccagctggtgcagacctacaaccagctgttcgaggaaaaccccatcaacgccagcggcgtggacgccaaggccatcctgtctgccagactgagcaagagcagacggctggaaaatctgatcgcccagctgcccggcgagaagaagaatggcctgttcggcaacctgattgccctgagcctgggcctgacccccaacttcaagagcaacttcgacctggccgaggatgccaaactgcagctgagcaaggacacctacgacgacgacctggacaacctgctggcccagatcggcgaccagtacgccgacctgtttctggccgccaagaacctgtccgacgccatcctgctgagcgacatcctgagagtgaacaccgagatcaccaaggcccccctgagcgcctctatgatcaagagatacgacgagcaccaccaggacctgaccctgctgaaagctctcgtgcggcagcagctgcctgagaagtacaaagagattttcttcgaccagagcaagaacggctacgccggctacatcgatggcggagccagccaggaagagttctacaagttcatcaagcccatcctggaaaagatggacggcaccgaggaactgctcgtgaagctgaacagagaggacctgctgcggaagcagcggaccttcgacaacggcagcatcccccaccagatccacctgggagagctgcacgccattctgcggcggcaggaagatttttacccattcctgaaggacaaccgggaaaagatcgagaagatcctgaccttccgcatcccctactacgtgggccctctggccaggggaaacagcagattcgcctggatgaccagaaagagcgaggaaaccatcaccccctggaacttcgaggaagtggtggacaagggcgccagcgcccagagcttcatcgagcggatgaccaacttcgataagaacctgcccaacgagaaggtgctgcccaagcacagcctgctgtacgagtacttcaccgtgtacaacgagctgaccaaagtgaaatacgtgaccgagggaatgagaaagcccgccttcctgagcggcgagcagaaaaaagccatcgtggacctgctgttcaagaccaaccggaaagtgaccgtgaagcagctgaaagaggactacttcaagaaaatcgagtgcttcgactccgtggaaatctccggcgtggaagatcggttcaacgcctccctgggcacataccacgatctgctgaaaattatcaaggacaaggacttcctggacaatgaggaaaacgaggacattctggaagat

SEQ ID NO: 178 - DNA, 10722 bp, synthetic construct
  misc_feature 1..10722: note = V60 DNA
  source 1..10722: mol_type = other DNA
aagggcctcgtgatacgcctatttttataggttaatgtcatgataataatggtttcttagacgtcaggtggcacttttcggggaaatgtgcgcggaacccctatttgtttatttttctaaatacattcaaatatgtatccgctcatgagacaataaccctgataaatgcttcaataatattgaaaaaggaagagtatgagtattcaacatttccgtgtcgcccttattcccttttttgcggcattttgccttcctgtttttgctcacccagaaacgctggtgaaagtaaaagatgctgaagatcagttgggtgcacgagtgggttacatcgaactggatctcaacagcggtaagatccttgagagttttcgccccgaagaacgttttccaatgatgagcacttttaaagttctgctatgtggcgcggtattatcccgtattgacgccgggcaagagcaactcggtcgccgcatacactattctcagaatgacttggttgagtactcaccagtcacagaaaagcatcttacggatggcatgacagtaagagaattatgcagtgctgccataaccatgagtgataacactgcggccaacttacttctgacaacgatcggaggaccgaaggagctaaccgcttttttgcacaacatgggggatcatgtaactcgccttgatcgttgggaaccggagctgaatgaagccataccaaacgacgagcgtgacaccacgatgcctgtagcaatggcaacaacgttgcgcaaactattaactggcgaactacttactctagcttcccggcaacaattaatagactggatggaggcggataaagttgcaggaccacttctgcgctcggcccttccggctggctggtttattgctgataaatctggagccggtgagcgtgggtctcgcggtatcattgcagcactggggccagatggtaagccctcccgtatcgtagttatctacacgacggggagtcaggcaactatggatgaacgaaatagacagatcgctgagataggtgcctcactgattaagcattggtaactgtcagaccaagtttactcatatatactttagattgatttaaaacttcatttttaatttaaaaggatctaggtgaagatcctttttgataatctcatgaccaaaatcccttaacgtgagttttcgttccactgagcgtcagaccccgtagaaaagatcaaaggatcttcttgagatcctttttttctgcgcgtaatctgctgcttgcaaacaaaaaaaccaccgctaccagcggtggtttgtttgccggatcaagagctaccaactctttttccgaaggtaactggcttcagcagagcgcagataccaaatactgttcttctagtgtagccgtagttaggccaccacttcaagaactctgtagcaccgcctacatacctcgctctgctaatcctgttaccagtggctgctgccagtggcgataagtcgtgtcttaccgggttggactcaagacgatagttaccggataaggcgcagcggtcgggctgaacggggggttcgtgcacacagcccagcttggagcgaacgacctacaccgaactgagatacctacagcgtgagctatgagaaagcgccacgcttcccgaagggagaaaggcggacaggtatccggtaagcggcagggtcggaacaggagagcgcacgagggagcttccagggggaaacgcctggtatctttatagtcctgtcgggtttcgccacctctgacttgagcgtcgatttttgtgatgctcgtcaggggggcggagcctatggaaaaacgccagcaacgcggcctttttacggttcctggccttttgctggccttttgctcacatgttctttcctgcgttatcccctgattctgtggataaccgtattaccgcctttgagtgagctgataccgctcgccgcagccgaacgaccgagcgcagcgagtcagtgagcgaggaagcggaagagcgcccaatacgcaaaccgcctctccccgcgcgttggccgattcattaatgcagctggcacgacaggtttcccgactggaaagcgggcagtgagcgcaacgcaattaatgtgagttagctcactcattaggcaccccaggctttacactttatgcttccggctcgtatgttgtgtggaattgtgagcggataacaatttcacacaggaaacagctatgaccatgattacgcctctagaaagctttaatacgactcactataaggactcactatttgttttcgcgcccagttgcaaaaagtgtcgacatttgcttctgacacaactgtgttcactagcaacctcaaacagacaccgccaccatgcctgctgctaagagagtgaaactggatggatcccggacactggtgaccttcaaggatgtatttgtggacttcaccagggaggagtggaagctgctggacactgctcagcagatcgtgtacagaaatgtgatgctggagaactataagaacctggtttccttgggttatcagcttactaagccagatgtgatcctccggttggagaagggagaagagcccggagggccgagctctggcgcacccccaccaagtggagggtctcctgccgggtccccaacatctactgaagaaggcaccagcgaatccgcaacgcccgagtcaggccctggtacctccacagaaccatctgaaggtagtgcgcctggttccccagctggaagccctacttccaccgaagaaggcacgtcaaccgaaccaagtgaaggatctgcccctgggaccagcactgaaccatctgagatgaaccatgaccaggaatttgaccccccaaaggtttacccacctgtgccagctgagaagaggaagcccatccgcgtgctgtctctctttgatgggattgctacagggctcctggtgctgaaggacctgggcatccaagtggaccgctacattgcctccgaggtgtgtgaggactccatcacggtgggcatggtgcggcaccagggaaagatcatgtacgtcggggacgtccgcagcgtcacacagaagcatatccaggagtggggcccattcgacctggtgattggaggcagtccctgcaatgacctctccattgtcaaccctgcccgcaagggactttatgagggtactggccgcctcttctttgagttctaccgcctcctgcatgatgcgcggcccaaggagggagatgatcgccccttcttctggctctttgagaatgtggtggccatgggcgttagtgacaagagggacatctcgcgatttcttgagtctaaccccgtgatgattgacgccaaagaagtgtctgctgcacacagggcccgttacttctggggtaaccttcctggcatgaacaggcctttggcatccactgtgaatgataagctggagctgcaagagtgtctggagcacggcagaatagccaagttcagcaaagtgaggaccattaccaccaggtcaaactctataaagcagggcaaagaccagcatttccccgtcttcatgaacgagaaggaggacatcctgtggtgcactgaaatggaaagggtgtttggcttccccgtccactacacagacgtctccaacatgagccgcttggcgaggcagagactgctgggccgatcgtggagcgtgccggtcatccgccacctcttcgctccgctgaaggaatattttgcttgtgtgggagggccgagctctggcgcacccccaccaagtggagggtctcctgccgggtccccaacatctactgaagaaggcaccagcgaatccgcaacgcccgagtcaggccctggtacctccacagaaccatctgaaggtagtgcgcctggttccccagctggaagccctacttccaccgaagaaggcacgtcaaccgaaccaagtgaaggatctgcccctgggaccagcactgaaccatctgagccaaaaaagaagagaaaggtaatggacaagaagtacagcatcggcctggccatcggcaccaactctgtgggctgggccgtgatcaccgacgagtacaaggtgcccagcaagaaattcaaggtgctgggcaacaccgaccggcacagcatcaagaagaacctgatcggcgccctgctgttcgacagcggagaaacagccgaggccacccggctgaagagaaccgccagaagaagatacaccagacggaagaaccggatctgctatctgcaagagatcttcagcaacgagatggccaaggtggacgacagcttcttccacagactggaagagtccttcctggtggaagaggataagaagcacgagcggcaccccatcttcggcaacatcgtggacgaggtggcctaccacgagaagtaccccaccatctaccacctgagaaagaaactggtggacagcaccgacaaggccgacctgcggctgatctatctggccctggcccacatgatcaagttccggggccacttcctgatcgagggcgacctgaaccccgacaacagcgacgtggacaagctgttcatccagctggtgcagacctacaaccagctgttcgaggaaaaccccatcaacgccagcggcgtggacgccaaggccatcctgtctgccagactgagcaagagcagacggctggaaaatctgatcgcccagctgcccggcgagaagaagaatggcctgttcggcaacctgattgccctgagcctgggcctgacccccaacttcaagagcaacttcgacctggccgaggatgccaaactgcagctgagcaaggacacctacgacgacgacctggacaacctgctggcccagatcggcgaccagtacgccgacctgtttctggccgccaagaacctgtccgacgccatcctgctgagcgacatcctgagagtgaacaccgagatcaccaaggcccccctgagcgcctctatgatcaagagatacgacgagcaccaccaggacctgaccctgctgaaagctctcgtgcggcagcagctgcctgagaagtacaaagagattttcttcgaccagagcaagaacggctacgccggctacatcgatggcggagccagccaggaagagttctacaagttcatcaagcccatcctggaaaagatggacggcaccgaggaactgctcgtgaagctgaacagagaggacctgctgcggaagcagcggaccttcgacaacggcagcatcccccaccagatccacctgggagagctgcacgccattctgcggcggcaggaagatttttacccattcctgaaggacaaccgggaaaagatcgagaagatcctgaccttccgcatcccctactacgtgggccctctggccaggggaaacagcagattcgcctggatgaccagaaagagcgaggaaaccatcaccccctggaacttcgaggaagtggtggacaagggcgccagcgcccagagcttcatcgagcggatgaccaacttcgataagaacctgcccaacgagaaggtgctgcccaagcacagcctgctgtacgagtacttcaccgtgtacaacgagctgaccaaagtgaaatacgtgaccgagggaatgagaaagcccgccttcctgagcggcgagcagaaaaaagccatcgtggacctgctgttcaagaccaaccggaaagtgaccgtgaagcagctgaaagaggactacttcaagaaaatcgagtgcttcgactccgtggaaatctccggcgtggaagatcggttcaacgcctccctgggcacataccacgatctgctgaaaattatcaaggacaaggacttcctggacaatgaggaaaacgaggacattctggaagatatcgtgctgaccctgacactgtttgaggacagagagatgatcgaggaacggctgaaaacctatgcccacctgttcgacgacaaagtgatgaagcagctgaagcggcggagatacaccggctggggcaggctgagccggaagctgatcaacggcatccgggacaagcagtccggcaagacaatcctggatttcctgaagtccgacggcttcgccaacagaaacttcatgcagctgatccacgacgacagcctgacctttaaagaggacatccagaaagcccaggtgtccggccagggcgatagcctgcacgagcacattgccaatctggccggcagccccgccattaagaagggcatcctgcagacagtgaaggtggtggacgagctcgtgaaagtgatgggccggcacaagcccgagaacatcgtgatcgaaatggccagagagaaccagaccacccagaagggacagaagaacagccgcgagagaatgaagcggatcgaagagggcatcaaagagctgggcagccagatcctgaaagaacaccccgtggaaaacacccagctgcagaacgagaagctgtacctgtactacctgcagaatgggcgggatatgtacgtggaccaggaactggacatcaaccggctgtccgactacgatgtggacgctatcgtgcctcagagctttctgaaggacgactccatcgataacaaagtgctgactcggagcgacaagaaccggggcaagagcgacaacgtgccctccgaagaggtcgtgaagaagatgaagaactactggcgccagctgctgaatgccaagctgattacccagaggaagttcgacaatctgaccaaggccgagagaggcggcctgagcgaactggataaggccggcttcatcaagagacagctggtggaaacccggcagatcacaaagcacgtggcacagatcctggactcccggatgaacactaagtacgacgagaacgacaaactgatccgggaagtgaaagtgatcaccctgaagtccaagctggtgtccgatttccggaaggatttccagttttacaaagtgcgcgagatcaacaactaccaccacgcccacgacgcctacctgaacgccgtcgtgggaaccgccctgatcaaaaagtaccctaagctggaaagcgagttcgtgtacggcgactacaaggtgtacgacgtgcggaagatgatcgccaagagcgagcaggaaatcggcaaggctaccgccaagtacttcttctacagcaacatcatgaactttttcaagaccgagattaccctggccaacggcgagatccggaagcggcctctgatcgagacaaacggcgaaacaggcgagatcgtgtgggataagggccgggactttgccaccgtgcggaaagtgctgtctatgccccaagtgaatatcgtgaaaaagaccgaggtgcagacaggcggcttcagcaaagagtctatcctgcccaagaggaacagcgacaagctgatcgccagaaagaaggactgggaccctaagaagtacggcggcttcgacagccccaccgtggcctattctgtgctggtggtggccaaagtggaaaagggcaagtccaagaaactgaagagtgtgaaagagctgctggggatcaccatcatggaaagaagcagcttcgagaagaatcccatcgactttctggaagccaagggctacaaagaagtgaaaaaggacctgatcatcaagctgcctaagtactccctgttcgagctggaaaacggccggaagagaatgctggcctctgccggcgaactgcagaagggaaacgaactggccctgccctccaaatatgtgaacttcctgtacctggccagccactatgagaagctgaagggctcccccgaggataatgagcagaaacagctgtttgtggaacagcacaaacactacctggacgagatcatcgagcagatcagcgagttctccaagagagtgatcctggccgacgctaatctggacaaggtgctgagcgcctacaacaagcacagagacaagcctatcagagagcaggccgagaatatcatccacctgtttaccctgaccaatctgggagcccctgccgccttcaagtactttgacaccaccatcgaccggaagaggtacaccagcaccaaagaggtgctggacgccaccctgatccaccagagcatcaccggcctgtacgagacacggatcgacctgtctcagctgggaggcgacgcctatccctatgacgtgcccgattatgccagcctgggcagcggctcccccaagaaaaaacgcaaggtggaagatcctaagaaaaagcggaaagtggacggcagcggcagcgagacccccggtaccagcgagagcgccacccccgagagccggacactcgccaagaccgtggcctatttctacgaccccgacgtgggcaacttccactacggagctggacaccctatgaagccccatcgcctggcattgacccatagcctggtcctgcattacggtctctataagaagatgatcgtcttcaagccataccaggcctcccaacatgacatgtgccgcttccactccgaggactacattgacttcctgcagagagtcagccccaccaatatgcaaggcttcaccaagagtcttaatgccttcaacgtaggcgatgactgcccagtgtttcccgggctctttgagttctgctcgcgttacacaggcgcatctctgcaaggagcaacccagctgaacaacaagatctgtgatattgccattaactgggctggtggtctgcaccatgccaagaagtttgaggcctctggcttctgctatgtcaacgacattgtgattggcatcctggagctgctcaagtaccaccctcgggtgctctacattgacattgacatccaccatggtgacggggttcaagaagctttctacctcactgaccgggtcatgacggtgtccttccacaaatacggaaattacttcttccctggcacaggtgacatgtatgaagtcggggcagagagtggccgctactactgtctgaacgtgcccctgcgggatggcattgatgaccagagttacaagcaccttttccagccggttatcaaccaggtagtggacttctaccaacccacgtgcattgtgctccagtgtggagctgactctctgggctgtgatcgattgggctgctttaacctcagcatccgagggcatggggaatgcgttgaatatgtcaagagcttcaatatccctctactcgtgctgggtggtggtggttatactgtccgaaatgttgcccgctgctggacatatgagacatcgctgctggtagaagaggccattagtgaggagcttccctatagtgaatacttcgagtactttgccccagacttcacacttcatccagatgtcagcacccgcatcgagaatcagaactcacgccagtatctggaccagatccgccagacaatctttgaaaacctgaagatgctgaaccatgcacctagtgtccagattcatgacgtgcctgcagacctcctgacctatgacaggactgatgaggctgatgcagaggagaggggtcctgaggagaactatagcaggccagaggcacccaatgagttctatgatggagaccatgacaatgacaaggaaagcgatgtggagattgagggcagcggcgctactaacttcagcctgctgaagcaggctggagacgtggaggagaaccctggacctatgcattaatgagatcccaagcacgcagcaatgcagctcaaaacgcttagcctagccacacccccacgggaaacagcagtgattaacctttagcaataaacgaaagtttaactaagctatactaaccccagggttggtcaatttcgtgccagccacaccctggtactgcatgcacgcaatgctagctgcccctttcccgtcctgggcaccccgagtctcccccgaccccgggtcccaggtatgctcccacctccacctgccccactcaccacctctgctagttccagacacctccgagacgaggaaaaaaaaaaaaaaaaaaaaaaaaaaaaaaaaaaaaaaaaaaaaaaaaaaaaaaaaaaaaaaaaaaaaaaaaaaaaaaaaaaaaaaaaaaaaaaaaaaaaaaaaaaaaaaaaaaaaaaaaaaaaaaaaaaaaaaaaaaaaaaaaaaaaaaaaaaaaaaaaaaaaaaaaaaaaaaaaaaaaaaaaaaaaaaaaaaaaaaaaaaaaaaaaaaaaaaaaaaaaaaaaaaaaaaaaaaaaaaaaaaaaaaaaaaaaaaaaaaaaaaaaaaaaaaaaaaaaaaaaaaaaaaaaaaaaaaaaaaaaaaaaaaaaaaaaaaaaaaaaaaaaaaaaaaaaaaaaaaaaaaaaaaaaaaaaaaaaaaaaaaaaaaaaaaaaaaaaaaaaaaaaaaaaaaaaaaccgtcttcaagctttctagaaattcactggccgtcgttttacaacgtcgtgactgggaaaaccctggcgttacccaacttaatcgccttgcagcacatccccctttcgccagctggcgtaatagcgaagaggcccgcaccgatcgcccttcccaacagttgcgcagcctgaatggcgaatggcgcctgatgcggtattttctccttacgcatctgtgcggtatttcacaccgcatatggtgcactctcagtacaatctgctctgatgccgcatagttaagccagccccgacacccgccaacacccgctgacgcgccctgacgggcttgtctgctcccggcatccgcttacagacaagctgtgaccgtctccgggagctgcatgtgtcagaggttttcaccgtcatcaccgaaacgcgcgagacga

SEQ ID NO: 179 - DNA, 11199 bp, synthetic construct
  misc_feature 1..11199: note = V61 DNA
  source 1..11199: mol_type = other DNA
agttcagcaaagtgaggaccattaccaccaggtcaaactctataaagcagggcaaagaccagcatttccccgtgttcatgaacgagaaggaggacatcctgtggtgcactgaaatggaaagggtgtttggcttccccgtccactacacagacgtctccaacatgagccgcttggcgaggcagagactgctgggccgatcgtggagcgtgccggtcatccgccacctcttcgctccgctgaaggaatattttgcttgtgtgtctagcggcaatagtaacgctaacagccgcgggccgagcttcagcagcggcctggtgccgttaagcttgcgcggcagccatatgggccctatggagatatacaagacagtgtctgcatggaagagacagccagtgcgggtactgagcctcttcagaaacatcgacaaggtactaaagagtttgggcttcttggaaagcggttctggttctgggggaggaacgctgaagtacgtggaagatgtcacaaatgtcgtgaggagagacgtggagaaatggggcccctttgacctggtgtacggctcgacgcagcccctaggcagctcttgtgatcgctgtcccggctggtacatgttccagttccaccggatcctgcagtatgcgctgcctcgccaggagagtcagcggcccttcttctggatattcatggacaatctgctgctgactgaggatgaccaagagacaactacccgcttccttcagacagaggctgtgaccctccaggatgtccgtggcagagactaccagaatgctatgcgggtgtggagcaacattccagggctgaagagcaagcatgcgcccctgaccccaaaggaagaagagtatctgcaagcccaagtcagaagcaggagcaagctggacgccccgaaagttgacctcctggtgaagaactgccttctcccgctgagagagtacttcaagtatttttctcaaaactcacttcctcttggagggccgagctctggcgcacccccaccaagtggagggtctcctgccgggtccccaacatctactgaagaaggcaccagcgaatccgcaacgcccgagtcaggccctggtacctccacagaaccatctgaaggtagtgcgcctggttccccagctggaagccctacttccaccgaagaaggcacgtcaaccgaaccaagtgaaggatctgcccctgggaccagcactgaaccatctgagccaaaaaagaagagaaaggtaatggacaagaagtacagcatcggcctggccatcggcaccaactctgtgggctgggccgtgatcaccgacgagtacaaggtgcccagcaagaaattcaaggtgctgggcaacaccgaccggcacagcatcaagaagaacctgatcggcgccctgctgttcgacagcggagaaacagccgaggccacccggctgaagagaaccgccagaagaagatacaccagacggaagaaccggatctgctatctgcaagagatcttcagcaacgagatggccaaggtggacgacagcttcttccacagactggaagagtccttcctggtggaagaggataagaagcacgagcggcaccccatcttcggcaacatcgtggacgaggtggcctaccacgagaagtaccccaccatctaccacctgagaaagaaactggtggacagcaccgacaaggccgacctgcggctgatctatctggccctggcccacatgatcaagttccggggccacttcctgatcgagggcgacctgaaccccgacaacagcgacgtggacaagctgttcatccagctggtgcagacctacaaccagctgttcgaggaaaaccccatcaacgccagcggcgtggacgccaaggccatcctgtctgccagactgagcaagagcagacggctggaaaatctgatcgcccagctgcccggcgagaagaagaatggcctgttcggcaacctgattgccctgagcctgggcctgacccccaacttcaagagcaacttcgacctggccgaggatgccaaactgcagctgagcaaggacacctacgacgacgacctggacaacctgctggcccagatcggcgaccagtacgccgacctgtttctggccgccaagaacctgtccgacgccatcctgctgagcgacatcctgagagtgaacaccgagatcaccaaggcccccctgagcgcctctatgatcaagagatacgacgagcaccaccaggacctgaccctgctgaaagctctcgtgcggcagcagctgcctgagaagtacaaagagattttcttcgaccagagcaagaacggctacgccggctacatcgatggcggagccagccaggaagagttctacaagttcatcaagcccatcctggaaaagatggacggcaccgaggaactgctcgtgaagctgaacagagaggacctgctgcggaagcagcggaccttcgacaacggcagcatcccccaccagatccacctgggagagctgcacgccattctgcggcggcaggaagatttttacccattcctgaaggacaaccgggaaaagatcgagaagatcctgaccttccgcatcccctactacgtgggccctctggccaggggaaacagcagattcgcctggatgaccagaaagagcgaggaaaccatcaccccctggaacttcgaggaagtggtggacaagggcgccagcgcccagagcttcatcgagcggatgaccaacttcgataagaacctgcccaacgagaaggtgctgcccaagcacagcctgctgtacgagtacttcaccgtgtacaacgagctgaccaaagtgaaatacgtgaccgagggaatgagaaagcccgccttcctgagcggcgagcagaaaaaagccatcgtggacctgctgttcaagaccaaccggaaagtgaccgtgaagcagctgaaagaggactacttcaagaaaatcgagtgcttcgactccgtggaaatctccggcgtggaagatcggttcaacgcctccctgggcacataccacgatctgctgaaaattatcaaggacaaggacttcctggacaatgaggaaaacgaggacattctggaagatatcgtgctgaccctgacactgtttgaggacagagagatgatcgaggaacggctgaaaacctatgcccacctgttcgacgacaaagtgatgaagcagctgaagcggcggagatacaccggctggggcaggctgagccggaagctgatcaacggcatccgggacaagcagtccggcaagacaatcctggatttcctgaagtccgacggcttcgccaacagaaacttcatgcagctgatccacgacgacagcctgacctttaaagaggacatccagaaagcccaggtgtccggccagggcgatagcctgcacgagcacattgccaatctggccggcagccccgccattaagaagggcatcctgcagacagtgaaggtggtggacgagctcgtgaaagtgatgggccggcacaagcccgagaacatcgtgatcgaaatggccagagagaaccagaccacccagaagggacagaagaacagccgcgagagaatgaagcggatcgaagagggcatcaaagagctgggcagccagatcctgaaagaacaccccgtggaaaacacccagctgcagaacgagaagctgtacctgtactacctgcagaatgggcgggatatgtacgtggaccaggaactggacatcaaccggctgtccgactacgatgtggacgctatcgtgcctcagagctttctgaaggacgactccatcgataacaaagtgctgactcggagcgacaagaaccggggcaagagcgacaacgtgccctccgaagaggtcgtgaagaagatgaagaactactggcgccagctgctgaatgccaagctgattacccagaggaagttcgacaatctgaccaaggccgagagaggcggcctgagcgaactggataaggccggcttcatcaagagacagctggtggaaacccggcagatcacaaagcacgtggcacagatcctggactcccggatgaacactaagtacgacgagaacgacaaactgatccgggaagtgaaagtgatcaccctgaagtccaagctggtgtccgatttccggaaggatttccagttttacaaagtgcgcgagatcaacaactaccaccacgcccacgacgcctacctgaacgccgtcgtgggaaccgccctgatcaaaaagtaccctaagctggaaagcgagttcgtgtacggcgactacaaggtgtacgacgtgcggaagatgatcgccaagagcgagcaggaaatcggcaaggctaccgccaagtacttcttctacagcaacatcatgaactttttcaagaccgagattaccctggccaacggcgagatccggaagcggcctctgatcgagacaaacggcgaaacaggcgagatcgtgtgggataagggccgggactttgccaccgtgcggaaagtgctgtctatgccccaagtgaatatcgtgaaaaagaccgaggtgcagacaggcggcttcagcaaagagtctatcctgcccaagaggaacagcgacaagctgatcgccagaaagaaggactgggaccctaagaagtacggcggcttcgacagccccaccgtggcctattctgtgctggtggtggccaaagtggaaaagggcaagtccaagaaactgaagagtgtgaaagagctgctggggatcaccatcatggaaagaagcagcttcgagaagaatcccatcgactttctggaagccaagggctacaaagaagtgaaaaaggacctgatcatcaagctgcctaagtactccctgttcgagctggaaaacggccggaagagaatgctggcctctgccggcgaactgcagaagggaaacgaactggccctgccctccaaatatgtgaacttcctgtacctggccagccactatgagaagctgaagggctcccccgaggataatgagcagaaacagctgtttgtggaacagcacaaacactacctggacgagatcatcgagcagatcagcgagttctccaagagagtgatcctggccgacgctaatctggacaaggtgctgagcgcctacaacaagcacagagacaagcctatcagagagcaggccgagaatatcatccacctgtttaccctgaccaatctgggagcccctgccgccttcaagtactttgacaccaccatcgaccggaagaggtacaccagcaccaaagaggtgctggacgccaccctgatccaccagagcatcaccggcctgtacgagacacggatcgacctgtctcagctgggaggcgacgcctatccctatgacgtgcccgattatgccagcctgggcagcggctcccccaagaaaaaacgcaaggtggaagatcctaagaaaaagcggaaagtggacggcagcggcagcgagacccccggtaccagcgagagcgccacccccgagagcatggaccaaatgccaaatctgttcagagggagcaaagcttgcattcatttcatacgctcttctgtcgacgatgttttaagtatgactgcttcctacatcgtaagtgcagttattccttccatgcaacacccaacacatataagaggaagaacacagaaacagctttggacaacaagccttgtggaccacagtgttaccagcatctgccactcctacctaggaactaagtgggtatatattgcctgttggattttggacagaagattcaatgaatggcacctacagaaggagggagctaaggagtttgctgctgctcttactgctgagcgtataaagacaccacctaaacgcccagggggccgcagaagaggaagacttccgaataacagtagcagacccagcacccccaccatcagtgtgctggagtcaaaggatacagacagtgacagagaagcagggactgaaactgggggagagaacaatgataaagaagaagaagagaaaaaagatgagacgtccagctcctctgaagcaaattctcggtgtcaaacaccaataaagatgaagccaaatattgaacctcctgagaatgtggagtggagtggtgctgaagcctccatgtttagagtcctcattggtacttactacgataacttttgtgccattgctaggctaattgggaccaaaacatgtagacaggtgtatgagtttagagtcaaggagtccagtatcatagcacctgttcccactgaggatgtagacactcctccaagaaagaagaaaaggaaacatcggttgtgggctgcacactgcagaaagatacaactgaaaaaggacggctcctctaaccatgtttacaactatcaaccctgtgaccatccacggcagccttgtgacagttcgtgcccttgtgtgatagcacaaaatttttgtgaaaagttttgtcaatgtagttcagagtgtcaaaaccgctttcctggatgtcggtgcaaagcacaatgcaacaccaaacagtgtccatgctacctggctgtccgagagtgtgaccctgacctctgtctcacgtgtggagctgctgaccattgggacagtaaaaatgtatcctgtaagaactgtagcattcagcggggctctaaaaagcacttactgctggcaccgtctgatgtggcaggctggggcatctttatcaaagatcctgtacagaaaaatgaattcatctcagaatactgtggggagattatttctcaggatgaagcagacagaagaggaaaagtgtatgacaaatacatgtgcagctttctgttcaacttgaacaatgattttgtggtggatgcaacccgaaagggcaacaaaattcgttttgctaatcattcagtaaatccaaactgctatgcaaaagttatgatggttaatggtgaccacaggataggcatctttgctaagagggctatccagactggtgaagagttgttttttgattacagatacagccaggctgatgccctgaagtatgtgggcatcgaacgagaaatggaaatcccttgatagtgagatcccaagcacgcagcaatgcagctcaaaacgcttagcctagccacacccccacgggaaacagcagtgattaacctttagcaataaacgaaagtttaactaagctatactaaccccagggttggtcaatttcgtgccagccacaccctggtactgcatgcacgcaatgctagctgcccctttcccgtcctgggcaccccgagtctcccccgaccccgggtcccaggtatgctcccacctccacctgccccactcaccacctctgctagttccagacacctccgagacgaggaaaaaaaaaaaaaaaaaaaaaaaaaaaaaaaaaaaaaaaaaaaaaaaaaaaaaaaaaaaaaaaaaaaaaaaaaaaaaaaaaaaaaaaaaaaaaaaaaaaaaaaaaaaaaaaaaaaaaaaaaaaaaaaaaaaaaaaaaaaaaaaaaaaaaaaaaaaaaaaaaaaaaaaaaaaaaaaaaaaaaaaaaaaaaaaaaaaaaaaaaaaaaaaaaaaaaaaaaaaaaaaaaaaaaaaaaaaaaaaaaaaaaaaaaaaaaaaaaaaaaaaaaaaaaaaaaaaaaaaaaaaaaaaaaaaaaaaaaaaaaaaaaaaaaaaaaaaaaaaaaaaaaaaaaaaaaaaaaaaaaaaaaaaaaaaaaaaaaaaaaaaaaaaaaaaaaaaaaaaaaaaaaaaaaaaaaaccgtcttcaagctttctagaaattcactggccgtcgttttacaacgtcgtgactgggaaaaccctggcgttacccaacttaatcgccttgcagcacatccccctttcgccagctggcgtaatagcgaagaggcccgcaccgatcgcccttcccaacagttgcgcagcctgaatggcgaatggcgcctgatgcggtattttctccttacgcatctgtgcggtatttcacaccgcatatggtgcactctcagtacaatctgctctgatgccgcatagttaagccagccccgacacccgccaacacccgctgacgcgccctgacgggcttgtctgctcccggcatccgcttacagacaagctgtgaccgtctccgggagctgcatgtgtcagaggttttcaccgtcatcaccgaaacgcgcgagacgaaagggcctcgtgatacgcctatttttataggttaatgtcatgataataatggtttcttagacgtcaggtggcacttttcggggaaatgtgcgcggaacccctatttgtttatttttctaaatacattcaaatatgtatccgctcatgagacaataaccctgataaatgcttcaataatattgaaaaaggaagagtatgagtattcaacatttccgtgtcgcccttattcccttttttgcggcattttgccttcctgtttttgctcacccagaaacgctggtgaaagtaaaagatgctgaagatcagttgggtgcacgagtgggttacatcgaactggatctcaacagcggtaagatccttgagagttttcgccccgaagaacgttttccaatgatgagcacttttaaagttctgctatgtggcgcggtattatcccgtattgacgccgggcaagagcaactcggtcgccgcatacactattctcagaatgacttggttgagtactcaccagtcacagaaaagcatcttacggatggcatgacagtaagagaattatgcagtgctgccataaccatgagtgataacactgcggccaacttacttctgacaacgatcggaggaccgaaggagctaaccgcttttttgcacaacatgggggatcatgtaactcgccttgatcgttgggaaccggagctgaatgaagccataccaaacgacgagcgtgacaccacgatgcctgtagcaatggcaacaacgttgcgcaaactattaactggcgaactacttactctagcttcccggcaacaattaatagactggatggaggcggataaagttgcaggaccacttctgcgctcggcccttccggctggctggtttattgctgataaatctggagccggtgagcgtgggtctcgcggtatcattgcagcactggggccagatggtaagccctcccgtatcgtagttatctacacgacggggagtcaggcaactatggatgaacgaaatagacagatcgctgagataggtgcctcactgattaagcattggtaactgtcagaccaagtttactcatatatactttagattgatttaaaacttcatttttaatttaaaaggatctaggtgaagatcctttttgataatctcatgaccaaaatcccttaacgtgagttttcgttccactgagcgtcagaccccgtagaaaagatcaaaggatcttcttgagatcctttttttctgcgcgtaatctgctgcttgcaaacaaaaaaaccaccgctaccagcggtggtttgtttgccggatcaagagctaccaactctttttccgaaggtaactggcttcagcagagcgcagataccaaatactgttcttctagtgtagccgtagttaggccaccacttcaagaactctgtagcaccgcctacatacctcgctctgctaatcctgttaccagtggctgctgccagtggcgataagtcgtgtcttaccgggttggactcaagacgatagttaccggataaggcgcagcggtcgggctgaacggggggttcgtgcacacagcccagcttggagcgaacgacctacaccgaactgagatacctacagcgtgagctatgagaaagcgccacgcttcccgaagggagaaaggcggacaggtatccggtaagcggcagggtcggaacaggagagcgcacgagggagcttccagggggaaacgcctggtatctttatagtcctgtcgggtttcgccacctctgacttgagcgtcgatttttgtgatgctcgtcaggggggcggagcctatggaaaaacgccagcaacgcggcctttttacggttcctggccttttgctggccttttgctcacatgttctttcctgcgttatcccctgattctgtggataaccgtattaccgcctttgagtgagctgataccgctcgccgcagccgaacgaccgagcgcagcgagtcagtgagcgaggaagcggaagagcgcccaatacgcaaaccgcctctccccgcgcgttggccgattcattaatgcagctggcacgacaggtttcccgactggaaagcgggcagtgagcgcaacgcaattaatgtgagttagctcactcattaggcaccccaggctttacactttatgcttccggctcgtatgttgtgtggaattgtgagcggataacaatttcacacaggaaacagctatgaccatgattacgcctctagaaagctttaatacgactcactataaggactcactatttgttttcgcgcccagttgcaaaaagtgtcgacatttgcttctgacacaactgtgttcactagcaacctcaaacagacaccgccaccatgcctgctgctaagagagtgaaactggatggatccaaccatgaccaggaatttgaccccccaaaggtttacccacctgtgccagctgagaagaggaagcccatccgcgtgctgtctctctttgatgggattgctacagggctcctggtgctgaaggacctgggcatccaagtggaccgctacattgcctccgaggtgtgtgaggactccatcacggtgggcatggtgcggcaccagggaaagatcatgtacgtcggggacgtccgcagcgtcacacagaagcatatccaggagtggggcccattcgacctggtgattggaggcagtccctgcaatgacctctccattgtcaaccctgcccgcaagggactttatgagggtactggccgcctcttctttgagttctaccgcctcctgcatgatgcgcggcccaaggagggagatgatcgccccttcttctggctctttgagaatgtggtggccatgggcgttagtgacaagagggacatctcgcgatttcttgagtctaaccccgtgatgattgacgccaaagaagtgtctgctgcacacagggcccgttacttctggggtaaccttcctggcatgaacaggcctttggcatccactgtgaatgataagctggagctgcaagagtgtctggagcacggcagaatagcca

SEQ ID NO: 180 - DNA, 11973 bp, synthetic construct
  misc_feature 1..11973: note = V62 DNA
  source 1..11973: mol_type = other DNA
atttaaaacttcatttttaatttaaaaggatctaggtgaagatcctttttgataatctcatgaccaaaatcccttaacgtgagttttcgttccactgagcgtcagaccccgtagaaaagatcaaaggatcttcttgagatcctttttttctgcgcgtaatctgctgcttgcaaacaaaaaaaccaccgctaccagcggtggtttgtttgccggatcaagagctaccaactctttttccgaaggtaactggcttcagcagagcgcagataccaaatactgttcttctagtgtagccgtagttaggccaccacttcaagaactctgtagcaccgcctacatacctcgctctgctaatcctgttaccagtggctgctgccagtggcgataagtcgtgtcttaccgggttggactcaagacgatagttaccggataaggcgcagcggtcgggctgaacggggggttcgtgcacacagcccagcttggagcgaacgacctacaccgaactgagatacctacagcgtgagctatgagaaagcgccacgcttcccgaagggagaaaggcggacaggtatccggtaagcggcagggtcggaacaggagagcgcacgagggagcttccagggggaaacgcctggtatctttatagtcctgtcgggtttcgccacctctgacttgagcgtcgatttttgtgatgctcgtcaggggggcggagcctatggaaaaacgccagcaacgcggcctttttacggttcctggccttttgctggccttttgctcacatgttctttcctgcgttatcccctgattctgtggataaccgtattaccgcctttgagtgagctgataccgctcgccgcagccgaacgaccgagcgcagcgagtcagtgagcgaggaagcggaagagcgcccaatacgcaaaccgcctctccccgcgcgttggccgattcattaatgcagctggcacgacaggtttcccgactggaaagcgggcagtgagcgcaacgcaattaatgtgagttagctcactcattaggcaccccaggctttacactttatgcttccggctcgtatgttgtgtggaattgtgagcggataacaatttcacacaggaaacagctatgaccatgattacgcctctagaaagctttaatacgactcactataaggactcactatttgttttcgcgcccagttgcaaaaagtgtcgacatttgcttctgacacaactgtgttcactagcaacctcaaacagacaccgccaccatgcctgctgctaagagagtgaaactggatggatccaaccatgaccaggaatttgaccccccaaaggtttacccacctgtgccagctgagaagaggaagcccatccgcgtgctgtctctctttgatgggattgctacagggctcctggtgctgaaggacctgggcatccaagtggaccgctacattgcctccgaggtgtgtgaggactccatcacggtgggcatggtgcggcaccagggaaagatcatgtacgtcggggacgtccgcagcgtcacacagaagcatatccaggagtggggcccattcgacctggtgattggaggcagtccctgcaatgacctctccattgtcaaccctgcccgcaagggactttatgagggtactggccgcctcttctttgagttctaccgcctcctgcatgatgcgcggcccaaggagggagatgatcgccccttcttctggctctttgagaatgtggtggccatgggcgttagtgacaagagggacatctcgcgatttcttgagtctaaccccgtgatgattgacgccaaagaagtgtctgctgcacacagggcccgttacttctggggtaaccttcctggcatgaacaggcctttggcatccactgtgaatgataagctggagctgcaagagtgtctggagcacggcagaatagccaagttcagcaaagtgaggaccattaccaccaggtcaaactctataaagcagggcaaagaccagcatttccccgtgttcatgaacgagaaggaggacatcctgtggtgcactgaaatggaaagggtgtttggcttccccgtccactacacagacgtctccaacatgagccgcttggcgaggcagagactgctgggccgatcgtggagcgtgccggtcatccgccacctcttcgctccgctgaaggaatattttgcttgtgtgtctagcggcaatagtaacgctaacagccgcgggccgagcttcagcagcggcctggtgccgttaagcttgcgcggcagccatatgggccctatggagatatacaagacagtgtctgcatggaagagacagccagtgcgggtactgagcctcttcagaaacatcgacaaggtactaaagagtttgggcttcttggaaagcggttctggttctgggggaggaacgctgaagtacgtggaagatgtcacaaatgtcgtgaggagagacgtggagaaatggggcccctttgacctggtgtacggctcgacgcagcccctaggcagctcttgtgatcgctgtcccggctggtacatgttccagttccaccggatcctgcagtatgcgctgcctcgccaggagagtcagcggcccttcttctggatattcatggacaatctgctgctgactgaggatgaccaagagacaactacccgcttccttcagacagaggctgtgaccctccaggatgtccgtggcagagactaccagaatgctatgcgggtgtggagcaacattccagggctgaagagcaagcatgcgcccctgaccccaaaggaagaagagtatctgcaagcccaagtcagaagcaggagcaagctggacgccccgaaagttgacctcctggtgaagaactgccttctcccgctgagagagtacttcaagtatttttctcaaaactcacttcctcttggagggccgagctctggcgcacccccaccaagtggagggtctcctgccgggtccccaacatctactgaagaaggcaccagcgaatccgcaacgcccgagtcaggccctggtacctccacagaaccatctgaaggtagtgcgcctggttccccagctggaagccctacttccaccgaagaaggcacgtcaaccgaaccaagtgaaggatctgcccctgggaccagcactgaaccatctgagccaaaaaagaagagaaaggtaatggacaagaagtacagcatcggcctggccatcggcaccaactctgtgggctgggccgtgatcaccgacgagtacaaggtgcccagcaagaaattcaaggtgctgggcaacaccgaccggcacagcatcaagaagaacctgatcggcgccctgctgttcgacagcggagaaacagccgaggccacccggctgaagagaaccgccagaagaagatacaccagacggaagaaccggatctgctatctgcaagagatcttcagcaacgagatggccaaggtggacgacagcttcttccacagactggaagagtccttcctggtggaagaggataagaagcacgagcggcaccccatcttcggcaacatcgtggacgaggtggcctaccacgagaagtaccccaccatctaccacctgagaaagaaactggtggacagcaccgacaaggccgacctgcggctgatctatctggccctggcccacatgatcaagttccggggccacttcctgatcgagggcgacctgaaccccgacaacagcgacgtggacaagctgttcatccagctggtgcagacctacaaccagctgttcgaggaaaaccccatcaacgccagcggcgtggacgccaaggccatcctgtctgccagactgagcaagagcagacggctggaaaatctgatcgcccagctgcccggcgagaagaagaatggcctgttcggcaacctgattgccctgagcctgggcctgacccccaacttcaagagcaacttcgacctggccgaggatgccaaactgcagctgagcaaggacacctacgacgacgacctggacaacctgctggcccagatcggcgaccagtacgccgacctgtttctggccgccaagaacctgtccgacgccatcctgctgagcgacatcctgagagtgaacaccgagatcaccaaggcccccctgagcgcctctatgatcaagagatacgacgagcaccaccaggacctgaccctgctgaaagctctcgtgcggcagcagctgcctgagaagtacaaagagattttcttcgaccagagcaagaacggctacgccggctacatcgatggcggagccagccaggaagagttctacaagttcatcaagcccatcctggaaaagatggacggcaccgaggaactgctcgtgaagctgaacagagaggacctgctgcggaagcagcggaccttcgacaacggcagcatcccccaccagatccacctgggagagctgcacgccattctgcggcggcaggaagatttttacccattcctgaaggacaaccgggaaaagatcgagaagatcctgaccttccgcatcccctactacgtgggccctctggccaggggaaacagcagattcgcctggatgaccagaaagagcgaggaaaccatcaccccctggaacttcgaggaagtggtggacaagggcgccagcgcccagagcttcatcgagcggatgaccaacttcgataagaacctgcccaacgagaaggtgctgcccaagcacagcctgctgtacgagtacttcaccgtgtacaacgagctgaccaaagtgaaatacgtgaccgagggaatgagaaagcccgccttcctgagcggcgagcagaaaaaagccatcgtggacctgctgttcaagaccaaccggaaagtgaccgtgaagcagctgaaagaggactacttcaagaaaatcgagtgcttcgactccgtggaaatctccggcgtggaagatcggttcaacgcctccctgggcacataccacgatctgctgaaaattatcaaggacaaggacttcctggacaatgaggaaaacgaggacattctggaagatatcgtgctgaccctgacactgtttgaggacagagagatgatcgaggaacggctgaaaacctatgcccacctgttcgacgacaaagtgatgaagcagctgaagcggcggagatacaccggctggggcaggctgagccggaagctgatcaacggcatccgggacaagcagtccggcaagacaatcctggatttcctgaagtccgacggcttcgccaacagaaacttcatgcagctgatccacgacgacagcctgacctttaaagaggacatccagaaagcccaggtgtccggccagggcgatagcctgcacgagcacattgccaatctggccggcagccccgccattaagaagggcatcctgcagacagtgaaggtggtggacgagctcgtgaaagtgatgggccggcacaagcccgagaacatcgtgatcgaaatggccagagagaaccagaccacccagaagggacagaagaacagccgcgagagaatgaagcggatcgaagagggcatcaaagagctgggcagccagatcctgaaagaacaccccgtggaaaacacccagctgcagaacgagaagctgtacctgtactacctgcagaatgggcgggatatgtacgtggaccaggaactggacatcaaccggctgtccgactacgatgtggacgctatcgtgcctcagagctttctgaaggacgactccatcgataacaaagtgctgactcggagcgacaagaaccggggcaagagcgacaacgtgccctccgaagaggtcgtgaagaagatgaagaactactggcgccagctgctgaatgccaagctgattacccagaggaagttcgacaatctgaccaaggccgagagaggcggcctgagcgaactggataaggccggcttcatcaagagacagctggtggaaacccggcagatcacaaagcacgtggcacagatcctggactcccggatgaacactaagtacgacgagaacgacaaactgatccgggaagtgaaagtgatcaccctgaagtccaagctggtgtccgatttccggaaggatttccagttttacaaagtgcgcgagatcaacaactaccaccacgcccacgacgcctacctgaacgccgtcgtgggaaccgccctgatcaaaaagtaccctaagctggaaagcgagttcgtgtacggcgactacaaggtgtacgacgtgcggaagatgatcgccaagagcgagcaggaaatcggcaaggctaccgccaagtacttcttctacagcaacatcatgaactttttcaagaccgagattaccctggccaacggcgagatccggaagcggcctctgatcgagacaaacggcgaaacaggcgagatcgtgtgggataagggccgggactttgccaccgtgcggaaagtgctgtctatgccccaagtgaatatcgtgaaaaagaccgaggtgcagacaggcggcttcagcaaagagtctatcctgcccaagaggaacagcgacaagctgatcgccagaaagaaggactgggaccctaagaagtacggcggcttcgacagccccaccgtggcctattctgtgctggtggtggccaaagtggaaaagggcaagtccaagaaactgaagagtgtgaaagagctgctggggatcaccatcatggaaagaagcagcttcgagaagaatcccatcgactttctggaagccaagggctacaaagaagtgaaaaaggacctgatcatcaagctgcctaagtactccctgttcgagctggaaaacggccggaagagaatgctggcctctgccggcgaactgcagaagggaaacgaactggccctgccctccaaatatgtgaacttcctgtacctggccagccactatgagaagctgaagggctcccccgaggataatgagcagaaacagctgtttgtggaacagcacaaacactacctggacgagatcatcgagcagatcagcgagttctccaagagagtgatcctggccgacgctaatctggacaaggtgctgagcgcctacaacaagcacagagacaagcctatcagagagcaggccgagaatatcatccacctgtttaccctgaccaatctgggagcccctgccgccttcaagtactttgacaccaccatcgaccggaagaggtacaccagcaccaaagaggtgctggacgccaccctgatccaccagagcatcaccggcctgtacgagacacggatcgacctgtctcagctgggaggcgacgcctatccctatgacgtgcccgattatgccagcctgggcagcggctcccccaagaaaaaacgcaaggtggaagatcctaagaaaaagcggaaagtggacggcagcggcagcgagacccccggtaccagcgagagcgccacccccgagagccggacactcggccagactgggaagaaatctgagaagggaccagtttgttggcggaagcgtgtaaaatcagagtacatgcgactgagacagctcaagaggttcagacgagctgatgaagtaaagagtatgtttagttccaatcgtcagaaaattttggaaagaacggaaatcttaaaccaagaatggaaacagcgaaggatacagcctgtgcacatcctgacttctgtgagctcattgcgcgggactagggagtgttcggtgaccagtgacttggattttccaacacaagtcatcccattaaagactctgaatgcagttgcttcagtacccataatgtattcttggtctcccctacagcagaattttatggtggaagatgaaactgttttacataacattccttatatgggagatgaagttttagatcaggatggtactttcattgaagaactaataaaaaattatgatgggaaagtacacggggatagagaatgtgggtttataaatgatgaaatttttgtggagttggtgaatgcccttggtcaatataatgatgatgacgatgatgatgatggagacgatcctgaagaaagagaagaaaagcagaaagatctggaggatcaccgagatgataaagaaagccgcccacctcggaaatttccttctgataaaatttttgaagccatttcctcaatgtttccagataagggcacagcagaagaactaaaggaaaaatataaagaactcaccgaacagcagctcccaggcgcacttcctcctgaatgtacccccaacatagatggaccaaatgctaaatctgttcagagagagcaaagcttacactcctttcatacgcttttctgtaggcgatgttttaaatatgactgcttcctacatccttttcatgcaacacccaacacttataagcggaagaacacagaaacagctctagacaacaaaccttgtggaccacagtgttaccagcatttggagggagcaaaggagtttgctgctgctctcaccgctgagcggataaagaccccaccaaaacgtccaggaggccgcagaagaggacggcttcccaataacagtagcaggcccagcacccccaccattaatgtgctggaatcaaaggatacagacagtgatagggaagcagggactgaaacggggggagagaacaatgataaagaagaagaagagaagaaagatgaaacttcgagctcctctgaagcaaattctcggtgtcaaacaccaataaagatgaagccaaatattgaacctcctgagaatgtggagtggagtggtgctgaagcctcaatgtttagagtcctcattggcacttactatgacaatttctgtgccattgctaggttaattgggaccaaaacatgtagacaggtgtatgagtttagagtcaaagaatctagcatcatagctccagctcccgctgaggatgtggatactcctccaaggaaaaagaagaggaaacaccggttgtgggctgcacactgcagaaagatacagctgaaaaaggacggctcctctaaccatgtttacaactatcaaccctgtgatcatccacggcagccttgtgacagttcgtgcccttgtgtgatagcacaaaatttttgtgaaaagttttgtcaatgtagttcagagtgtcaaaaccgctttccgggatgccgctgcaaagcacagtgcaacaccaagcagtgcccgtgctacctggctgtccgagagtgtgaccctgacctctgtcttacttgtggagccgctgaccattgggacagtaaaaatgtgtcctgcaagaactgcagtattcagcggggctccaaaaagcatctattgctggcaccatctgacgtggcaggctgggggatttttatcaaagatcctgtgcagaaaaatgaattcatctcagaatactgtggagagattatttctcaagatgaagctgacagaagagggaaagtgtatgataaatacatgtgcagctttctgttcaacttgaacaatgattttgtggtggatgcaacccgcaagggtaacaaaattcgttttgcaaatcattcggtaaatccaaactgctatgcaaaagttatgatggttaacggtgatcacaggataggtatttttgccaagagagccatccagactggcgaagagctgttttttgattacagatacagccaggctgatgccctgaagtatgtcggcatcgaaagagaaatggaaatccctgagggcagcggcgctactaacttcagcctgctgaagcaggctggagacgtggaggagaaccctggacctatgcattaatgagatcccaagcacgcagcaatgcagctcaaaacgcttagcctagccacacccccacgggaaacagcagtgattaacctttagcaataaacgaaagtttaactaagctatactaaccccagggttggtcaatttcgtgccagccacaccctggtactgcatgcacgcaatgctagctgcccctttcccgtcctgggcaccccgagtctcccccgaccccgggtcccaggtatgctcccacctccacctgccccactcaccacctctgctagttccagacacctccgagacgaggaaaaaaaaaaaaaaaaaaaaaaaaaaaaaaaaaaaaaaaaaaaaaaaaaaaaaaaaaaaaaaaaaaaaaaaaaaaaaaaaaaaaaaaaaaaaaaaaaaaaaaaaaaaaaaaaaaaaaaaaaaaaaaaaaaaaaaaaaaaaaaaaaaaaaaaaaaaaaaaaaaaaaaaaaaaaaaaaaaaaaaaaaaaaaaaaaaaaaaaaaaaaaaaaaaaaaaaaaaaaaaaaaaaaaaaaaaaaaaaaaaaaaaaaaaaaaaaaaaaaaaaaaaaaaaaaaaaaaaaaaaaaaaaaaaaaaaaaaaaaaaaaaaaaaaaaaaaaaaaaaaaaaaaaaaaaaaaaaaaaaaaaaaaaaaaaaaaaaaaaaaaaaaaaaaaaaaaaaaaaaaaaaaaaaaaaaaccgtcttcaagctttctagaaattcactggccgtcgttttacaacgtcgtgactgggaaaaccctggcgttacccaacttaatcgccttgcagcacatccccctttcgccagctggcgtaatagcgaagaggcccgcaccgatcgcccttcccaacagttgcgcagcctgaatggcgaatggcgcctgatgcggtattttctccttacgcatctgtgcggtatttcacaccgcatatggtgcactctcagtacaatctgctctgatgccgcatagttaagccagccccgacacccgccaacacccgctgacgcgccctgacgggcttgtctgctcccggcatccgcttacagacaagctgtgaccgtctccgggagctgcatgtgtcagaggttttcaccgtcatcaccgaaacgcgcgagacgaaagggcctcgtgatacgcctatttttataggttaatgtcatgataataatggtttcttagacgtcaggtggcacttttcggggaaatgtgcgcggaacccctatttgtttatttttctaaatacattcaaatatgtatccgctcatgagacaataaccctgataaatgcttcaataatattgaaaaaggaagagtatgagtattcaacatttccgtgtcgcccttattcccttttttgcggcattttgccttcctgtttttgctcacccagaaacgctggtgaaagtaaaagatgctgaagatcagttgggtgcacgagtgggttacatcgaactggatctcaacagcggtaagatccttgagagttttcgccccgaagaacgttttccaatgatgagcacttttaaagttctgctatgtggcgcggtattatcccgtattgacgccgggcaagagcaactcggtcgccgcatacactattctcagaatgacttggttgagtactcaccagtcacagaaaagcatcttacggatggcatgacagtaagagaattatgcagtgctgccataaccatgagtgataacactgcggccaacttacttctgacaacgatcggaggaccgaaggagctaaccgcttttttgcacaacatgggggatcatgtaactcgccttgatcgttgggaaccggagctgaatgaagccataccaaacgacgagcgtgacaccacgatgcctgtagcaatggcaacaacgttgcgcaaactattaactggcgaactacttactctagcttcccggcaacaattaatagactggatggaggcggataaagttgcaggaccacttctgcgctcggcccttccggctggctggtttattgctgataaatctggagccggtgagcgtgggtctcgcggtatcattgcagcactggggccagatggtaagccctcccgtatcgtagttatctacacgacggggagtcaggcaactatggatgaacgaaatagacagatcgctgagataggtgcctcactgattaagcattggtaactgtcagaccaagtttactcatatatactttagattg

SEQ ID NO: 181 - DNA, 10530 bp, synthetic construct
  misc_feature 1..10530: note = V63 DNA
  source 1..10530: mol_type = other DNA
tttaatttaaaaggatctaggtgaagatcctttttgataatctcatgaccaaaatcccttaacgtgagttttcgttccactgagcgtcagaccccgtagaaaagatcaaaggatcttcttgagatcctttttttctgcgcgtaatctgctgcttgcaaacaaaaaaaccaccgctaccagcggtggtttgtttgccggatcaagagctaccaactctttttccgaaggtaactggcttcagcagagcgcagataccaaatactgttcttctagtgtagccgtagttaggccaccacttcaagaactctgtagcaccgcctacatacctcgctctgctaatcctgttaccagtggctgctgccagtggcgataagtcgtgtcttaccgggttggactcaagacgatagttaccggataaggcgcagcggtcgggctgaacggggggttcgtgcacacagcccagcttggagcgaacgacctacaccgaactgagatacctacagcgtgagctatgagaaagcgccacgcttcccgaagggagaaaggcggacaggtatccggtaagcggcagggtcggaacaggagagcgcacgagggagcttccagggggaaacgcctggtatctttatagtcctgtcgggtttcgccacctctgacttgagcgtcgatttttgtgatgctcgtcaggggggcggagcctatggaaaaacgccagcaacgcggcctttttacggttcctggccttttgctggccttttgctcacatgttctttcctgcgttatcccctgattctgtggataaccgtattaccgcctttgagtgagctgataccgctcgccgcagccgaacgaccgagcgcagcgagtcagtgagcgaggaagcggaagagcgcccaatacgcaaaccgcctctccccgcgcgttggccgattcattaatgcagctggcacgacaggtttcccgactggaaagcgggcagtgagcgcaacgcaattaatgtgagttagctcactcattaggcaccccaggctttacactttatgcttccggctcgtatgttgtgtggaattgtgagcggataacaatttcacacaggaaacagctatgaccatgattacgcctctagaaagctttaatacgactcactataaggactcactatttgttttcgcgcccagttgcaaaaagtgtcgacatttgcttctgacacaactgtgttcactagcaacctcaaacagacaccgccaccatgcctgctgctaagagagtgaaactggatggatccaaccatgaccaggaatttgaccccccaaaggtttacccacctgtgccagctgagaagaggaagcccatccgcgtgctgtctctctttgatgggattgctacagggctcctggtgctgaaggacctgggcatccaagtggaccgctacattgcctccgaggtgtgtgaggactccatcacggtgggcatggtgcggcaccagggaaagatcatgtacgtcggggacgtccgcagcgtcacacagaagcatatccaggagtggggcccattcgacctggtgattggaggcagtccctgcaatgacctctccattgtcaaccctgcccgcaagggactttatgagggtactggccgcctcttctttgagttctaccgcctcctgcatgatgcgcggcccaaggagggagatgatcgccccttcttctggctctttgagaatgtggtggccatgggcgttagtgacaagagggacatctcgcgatttcttgagtctaaccccgtgatgattgacgccaaagaagtgtctgctgcacacagggcccgttacttctggggtaaccttcctggcatgaacaggcctttggcatccactgtgaatgataagctggagctgcaagagtgtctggagcacggcagaatagccaagttcagcaaagtgaggaccattaccaccaggtcaaactctataaagcagggcaaagaccagcatttccccgtgttcatgaacgagaaggaggacatcctgtggtgcactgaaatggaaagggtgtttggcttccccgtccactacacagacgtctccaacatgagccgcttggcgaggcagagactgctgggccgatcgtggagcgtgccggtcatccgccacctcttcgctccgctgaaggaatattttgcttgtgtgtctagcggcaatagtaacgctaacagccgcgggccgagcttcagcagcggcctggtgccgttaagcttgcgcggcagccatatgggccctatggagatatacaagacagtgtctgcatggaagagacagccagtgcgggtactgagcctcttcagaaacatcgacaaggtactaaagagtttgggcttcttggaaagcggttctggttctgggggaggaacgctgaagtacgtggaagatgtcacaaatgtcgtgaggagagacgtggagaaatggggcccctttgacctggtgtacggctcgacgcagcccctaggcagctcttgtgatcgctgtcccggctggtacatgttccagttccaccggatcctgcagtatgcgctgcctcgccaggagagtcagcggcccttcttctggatattcatggacaatctgctgctgactgaggatgaccaagagacaactacccgcttccttcagacagaggctgtgaccctccaggatgtccgtggcagagactaccagaatgctatgcgggtgtggagcaacattccagggctgaagagcaagcatgcgcccctgaccccaaaggaagaagagtatctgcaagcccaagtcagaagcaggagcaagctggacgccccgaaagttgacctcctggtgaagaactgccttctcccgctgagagagtacttcaagtatttttctcaaaactcacttcctcttggagggccgagctctggcgcacccccaccaagtggagggtctcctgccgggtccccaacatctactgaagaaggcaccagcgaatccgcaacgcccgagtcaggccctggtacctccacagaaccatctgaaggtagtgcgcctggttccccagctggaagccctacttccaccgaagaaggcacgtcaaccgaaccaagtgaaggatctgcccctgggaccagcactgaaccatctgagccaaaaaagaagagaaaggtaatggacaagaagtacagcatcggcctggccatcggcaccaactctgtgggctgggccgtgatcaccgacgagtacaaggtgcccagcaagaaattcaaggtgctgggcaacaccgaccggcacagcatcaagaagaacctgatcggcgccctgctgttcgacagcggagaaacagccgaggccacccggctgaagagaaccgccagaagaagatacaccagacggaagaaccggatctgctatctgcaagagatcttcagcaacgagatggccaaggtggacgacagcttcttccacagactggaagagtccttcctggtggaagaggataagaagcacgagcggcaccccatcttcggcaacatcgtggacgaggtggcctaccacgagaagtaccccaccatctaccacctgagaaagaaactggtggacagcaccgacaaggccgacctgcggctgatctatctggccctggcccacatgatcaagttccggggccacttcctgatcgagggcgacctgaaccccgacaacagcgacgtggacaagctgttcatccagctggtgcagacctacaaccagctgttcgaggaaaaccccatcaacgccagcggcgtggacgccaaggccatcctgtctgccagactgagcaagagcagacggctggaaaatctgatcgcccagctgcccggcgagaagaagaatggcctgttcggcaacctgattgccctgagcctgggcctgacccccaacttcaagagcaacttcgacctggccgaggatgccaaactgcagctgagcaaggacacctacgacgacgacctggacaacctgctggcccagatcggcgaccagtacgccgacctgtttctggccgccaagaacctgtccgacgccatcctgctgagcgacatcctgagagtgaacaccgagatcaccaaggcccccctgagcgcctctatgatcaagagatacgacgagcaccaccaggacctgaccctgctgaaagctctcgtgcggcagcagctgcctgagaagtacaaagagattttcttcgaccagagcaagaacggctacgccggctacatcgatggcggagccagccaggaagagttctacaagttcatcaagcccatcctggaaaagatggacggcaccgaggaactgctcgtgaagctgaacagagaggacctgctgcggaagcagcggaccttcgacaacggcagcatcccccaccagatccacctgggagagctgcacgccattctgcggcggcaggaagatttttacccattcctgaaggacaaccgggaaaagatcgagaagatcctgaccttccgcatcccctactacgtgggccctctggccaggggaaacagcagattcgcctggatgaccagaaagagcgaggaaaccatcaccccctggaacttcgaggaagtggtggacaagggcgccagcgcccagagcttcatcgagcggatgaccaacttcgataagaacctgcccaacgagaaggtgctgcccaagcacagcctgctgtacgagtacttcaccgtgtacaacgagctgaccaaagtgaaatacgtgaccgagggaatgagaaagcccgccttcctgagcggcgagcagaaaaaagccatcgtggacctgctgttcaagaccaaccggaaagtgaccgtgaagcagctgaaagaggactacttcaagaaaatcgagtgcttcgactccgtggaaatctccggcgtggaagatcggttcaacgcctccctgggcacataccacgatctgctgaaaattatcaaggacaaggacttcctggacaatgaggaaaacgaggacattctggaagatatcgtgctgaccctgacactgtttgaggacagagagatgatcgaggaacggctgaaaacctatgcccacctgttcgacgacaaagtgatgaagcagctgaagcggcggagatacaccggctggggcaggctgagccggaagctgatcaacggcatccgggacaagcagtccggcaagacaatcctggatttcctgaagtccgacggcttcgccaacagaaacttcatgcagctgatccacgacgacagcctgacctttaaagaggacatccagaaagcccaggtgtccggccagggcgatagcctgcacgagcacattgccaatctggccggcagccccgccattaagaagggcatcctgcagacagtgaaggtggtggacgagctcgtgaaagtgatgggccggcacaagcccgagaacatcgtgatcgaaatggccagagagaaccagaccacccagaagggacagaagaacagccgcgagagaatgaagcggatcgaagagggcatcaaagagctgggcagccagatcctgaaagaacaccccgtggaaaacacccagctgcagaacgagaagctgtacctgtactacctgcagaatgggcgggatatgtacgtggaccaggaactggacatcaaccggctgtccgactacgatgtggacgctatcgtgcctcagagctttctgaaggacgactccatcgataacaaagtgctgactcggagcgacaagaaccggggcaagagcgacaacgtgccctccgaagaggtcgtgaagaagatgaagaactactggcgccagctgctgaatgccaagctgattacccagaggaagttcgacaatctgaccaaggccgagagaggcggcctgagcgaactggataaggccggcttcatcaagagacagctggtggaaacccggcagatcacaaagcacgtggcacagatcctggactcccggatgaacactaagtacgacgagaacgacaaactgatccgggaagtgaaagtgatcaccctgaagtccaagctggtgtccgatttccggaaggatttccagttttacaaagtgcgcgagatcaacaactaccaccacgcccacgacgcctacctgaacgccgtcgtgggaaccgccctgatcaaaaagtaccctaagctggaaagcgagttcgtgtacggcgactacaaggtgtacgacgtgcggaagatgatcgccaagagcgagcaggaaatcggcaaggctaccgccaagtacttcttctacagcaacatcatgaactttttcaagaccgagattaccctggccaacggcgagatccggaagcggcctctgatcgagacaaacggcgaaacaggcgagatcgtgtgggataagggccgggactttgccaccgtgcggaaagtgctgtctatgccccaagtgaatatcgtgaaaaagaccgaggtgcagacaggcggcttcagcaaagagtctatcctgcccaagaggaacagcgacaagctgatcgccagaaagaaggactgggaccctaagaagtacggcggcttcgacagccccaccgtggcctattctgtgctggtggtggccaaagtggaaaagggcaagtccaagaaactgaagagtgtgaaagagctgctggggatcaccatcatggaaagaagcagcttcgagaagaatcccatcgactttctggaagccaagggctacaaagaagtgaaaaaggacctgatcatcaagctgcctaagtactccctgttcgagctggaaaacggccggaagagaatgctggcctctgccggcgaactgcagaagggaaacgaactggccctgccctccaaatatgtgaacttcctgtacctggccagccactatgagaagctgaagggctcccccgaggataatgagcagaaacagctgtttgtggaacagcacaaacactacctggacgagatcatcgagcagatcagcgagttctccaagagagtgatcctggccgacgctaatctggacaaggtgctgagcgcctacaacaagcacagagacaagcctatcagagagcaggccgagaatatcatccacctgtttaccctgaccaatctgggagcccctgccgccttcaagtactttgacaccaccatcgaccggaagaggtacaccagcaccaaagaggtgctggacgccaccctgatccaccagagcatcaccggcctgtacgagacacggatcgacctgtctcagctgggaggcgacgcctatccctatgacgtgcccgattatgccagcctgggcagcggctcccccaagaaaaaacgcaaggtggaagatcctaagaaaaagcggaaagtggacggcagcggcagcgagacccccggtaccagcgagagcgccacccccgagagccggacactcgaggatgtggatactcctccaaggaaaaagaagaggaaacaccggttgtgggctgcacactgcagaaagatacagctgaaaaaggacggctcctctaaccatgtttacaactatcaaccctgtgatcatccacggcagccttgtgacagttcgtgcccttgtgtgatagcacaaaatttttgtgaaaagttttgtcaatgtagttcagagtgtcaaaaccgctttccgggatgccgctgcaaagcacagtgcaacaccaagcagtgcccgtgctacctggctgtccgagagtgtgaccctgacctctgtcttacttgtggagccgctgaccattgggacagtaaaaatgtgtcctgcaagaactgcagtattcagcggggctccaaaaagcatctattgctggcaccatctgacgtggcaggctgggggatttttatcaaagatcctgtgcagaaaaatgaattcatctcagaatactgtggagagattatttctcaagatgaagctgacagaagagggaaagtgtatgataaatacatgtgcagctttctgttcaacttgaacaatgattttgtggtggatgcaacccgcaagggtaacaaaattcgttttgcaaatcattcggtaaatccaaactgctatgcaaaagttatgatggttaacggtgatcacaggataggtatttttgccaagagagccatccagactggcgaagagctgttttttgattacagatacagccaggctgatgccctgaagtatgtcggcatcgaaagagaaatggaaatccctgagggcagcggcgctactaacttcagcctgctgaagcaggctggagacgtggaggagaaccctggacctatgcattaatgagatcccaagcacgcagcaatgcagctcaaaacgcttagcctagccacacccccacgggaaacagcagtgattaacctttagcaataaacgaaagtttaactaagctatactaaccccagggttggtcaatttcgtgccagccacaccctggtactgcatgcacgcaatgctagctgcccctttcccgtcctgggcaccccgagtctcccccgaccccgggtcccaggtatgctcccacctccacctgccccactcaccacctctgctagttccagacacctccgagacgaggaaaaaaaaaaaaaaaaaaaaaaaaaaaaaaaaaaaaaaaaaaaaaaaaaaaaaaaaaaaaaaaaaaaaaaaaaaaaaaaaaaaaaaaaaaaaaaaaaaaaaaaaaaaaaaaaaaaaaaaaaaaaaaaaaaaaaaaaaaaaaaaaaaaaaaaaaaaaaaaaaaaaaaaaaaaaaaaaaaaaaaaaaaaaaaaaaaaaaaaaaaaaaaaaaaaaaaaaaaaaaaaaaaaaaaaaaaaaaaaaaaaaaaaaaaaaaaaaaaaaaaaaaaaaaaaaaaaaaaaaaaaaaaaaaaaaaaaaaaaaaaaaaaaaaaaaaaaaaaaaaaaaaaaaaaaaaaaaaaaaaaaaaaaaaaaaaaaaaaaaaaaaaaaaaaaaaaaaaaaaaaaaaaaaaaaaaaccgtcttcaagctttctagaaattcactggccgtcgttttacaacgtcgtgactgggaaaaccctggcgttacccaacttaatcgccttgcagcacatccccctttcgccagctggcgtaatagcgaagaggcccgcaccgatcgcccttcccaacagttgcgcagcctgaatggcgaatggcgcctgatgcggtattttctccttacgcatctgtgcggtatttcacaccgcatatggtgcactctcagtacaatctgctctgatgccgcatagttaagccagccccgacacccgccaacacccgctgacgcgccctgacgggcttgtctgctcccggcatccgcttacagacaagctgtgaccgtctccgggagctgcatgtgtcagaggttttcaccgtcatcaccgaaacgcgcgagacgaaagggcctcgtgatacgcctatttttataggttaatgtcatgataataatggtttcttagacgtcaggtggcacttttcggggaaatgtgcgcggaacccctatttgtttatttttctaaatacattcaaatatgtatccgctcatgagacaataaccctgataaatgcttcaataatattgaaaaaggaagagtatgagtattcaacatttccgtgtcgcccttattcccttttttgcggcattttgccttcctgtttttgctcacccagaaacgctggtgaaagtaaaagatgctgaagatcagttgggtgcacgagtgggttacatcgaactggatctcaacagcggtaagatccttgagagttttcgccccgaagaacgttttccaatgatgagcacttttaaagttctgctatgtggcgcggtattatcccgtattgacgccgggcaagagcaactcggtcgccgcatacactattctcagaatgacttggttgagtactcaccagtcacagaaaagcatcttacggatggcatgacagtaagagaattatgcagtgctgccataaccatgagtgataacactgcggccaacttacttctgacaacgatcggaggaccgaaggagctaaccgcttttttgcacaacatgggggatcatgtaactcgccttgatcgttgggaaccggagctgaatgaagccataccaaacgacgagcgtgacaccacgatgcctgtagcaatggcaacaacgttgcgcaaactattaactggcgaactacttactctagcttcccggcaacaattaatagactggatggaggcggataaagttgcaggaccacttctgcgctcggcccttccggctggctggtttattgctgataaatctggagccggtgagcgtgggtctcgcggtatcattgcagcactggggccagatggtaagccctcccgtatcgtagttatctacacgacggggagtcaggcaactatggatgaacgaaatagacagatcgctgagataggtgcctcactgattaagcattggtaactgtcagaccaagtttactcatatatactttagattgatttaaaacttcatt

SEQ ID NO: 182 - DNA, 11019 bp, synthetic construct
  misc_feature 1..11019: note = V64 DNA
  source 1..11019: mol_type = other DNA
gtcagaccaagtttactcatatatactttagattgatttaaaacttcatttttaatttaaaaggatctaggtgaagatcctttttgataatctcatgaccaaaatcccttaacgtgagttttcgttccactgagcgtcagaccccgtagaaaagatcaaaggatcttcttgagatcctttttttctgcgcgtaatctgctgcttgcaaacaaaaaaaccaccgctaccagcggtggtttgtttgccggatcaagagctaccaactctttttccgaaggtaactggcttcagcagagcgcagataccaaatactgttcttctagtgtagccgtagttaggccaccacttcaagaactctgtagcaccgcctacatacctcgctctgctaatcctgttaccagtggctgctgccagtggcgataagtcgtgtcttaccgggttggactcaagacgatagttaccggataaggcgcagcggtcgggctgaacggggggttcgtgcacacagcccagcttggagcgaacgacctacaccgaactgagatacctacagcgtgagctatgagaaagcgccacgcttcccgaagggagaaaggcggacaggtatccggtaagcggcagggtcggaacaggagagcgcacgagggagcttccagggggaaacgcctggtatctttatagtcctgtcgggtttcgccacctctgacttgagcgtcgatttttgtgatgctcgtcaggggggcggagcctatggaaaaacgccagcaacgcggcctttttacggttcctggccttttgctggccttttgctcacatgttctttcctgcgttatcccctgattctgtggataaccgtattaccgcctttgagtgagctgataccgctcgccgcagccgaacgaccgagcgcagcgagtcagtgagcgaggaagcggaagagcgcccaatacgcaaaccgcctctccccgcgcgttggccgattcattaatgcagctggcacgacaggtttcccgactggaaagcgggcagtgagcgcaacgcaattaatgtgagttagctcactcattaggcaccccaggctttacactttatgcttccggctcgtatgttgtgtggaattgtgagcggataacaatttcacacaggaaacagctatgaccatgattacgcctctagaaagctttaatacgactcactataaggactcactatttgttttcgcgcccagttgcaaaaagtgtcgacatttgcttctgacacaactgtgttcactagcaacctcaaacagacaccgccaccatgcctgctgctaagagagtgaaactggatggatccaaccatgaccaggaatttgaccccccaaaggtttacccacctgtgccagctgagaagaggaagcccatccgcgtgctgtctctctttgatgggattgctacagggctcctggtgctgaaggacctgggcatccaagtggaccgctacattgcctccgaggtgtgtgaggactccatcacggtgggcatggtgcggcaccagggaaagatcatgtacgtcggggacgtccgcagcgtcacacagaagcatatccaggagtggggcccattcgacctggtgattggaggcagtccctgcaatgacctctccattgtcaaccctgcccgcaagggactttatgagggtactggccgcctcttctttgagttctaccgcctcctgcatgatgcgcggcccaaggagggagatgatcgccccttcttctggctctttgagaatgtggtggccatgggcgttagtgacaagagggacatctcgcgatttcttgagtctaaccccgtgatgattgacgccaaagaagtgtctgctgcacacagggcccgttacttctggggtaaccttcctggcatgaacaggcctttggcatccactgtgaatgataagctggagctgcaagagtgtctggagcacggcagaatagccaagttcagcaaagtgaggaccattaccaccaggtcaaactctataaagcagggcaaagaccagcatttccccgtcttcatgaacgagaaggaggacatcctgtggtgcactgaaatggaaagggtgtttggcttccccgtccactacacagacgtctccaacatgagccgcttggcgaggcagagactgctgggccgatcgtggagcgtgccggtcatccgccacctcttcgctccgctgaaggaatattttgcttgtgtgtctagcggcaatagtaacgctaacagccgcgggccgagcttcagcagcggcctggtgccgttaagcttgcgcggcagccatatgggccctatggagatatacaagacagtgtctgcatggaagagacagccagtgcgggtactgagcctcttcagaaacatcgacaaggtactaaagagtttgggcttcttggaaagcggttctggttctgggggaggaacgctgaagtacgtggaagatgtcacaaatgtcgtgaggagagacgtggagaaatggggcccctttgacctggtgtacggctcgacgcagcccctaggcagctcttgtgatcgctgtcccggctggtacatgttccagttccaccggatcctgcagtatgcgctgcctcgccaggagagtcagcggcccttcttctggatattcatggacaatctgctgctgactgaggatgaccaagagacaactacccgcttccttcagacagaggctgtgaccctccaggatgtccgtggcagagactaccagaatgctatgcgggtgtggagcaacattccagggctgaagagcaagcatgcgcccctgaccccaaaggaagaagagtatctgcaagcccaagtcagaagcaggagcaagctggacgccccgaaagttgacctcctggtgaagaactgccttctcccgctgagagagtacttcaagtatttttctcaaaactcacttcctcttggagggccgagctctggcgcacccccaccaagtggagggtctcctgccgggtccccaacatctactgaagaaggcaccagcgaatccgcaacgcccgagtcaggccctggtacctccacagaaccatctgaaggtagtgcgcctggttccccagctggaagccctacttccaccgaagaaggcacgtcaaccgaaccaagtgaaggatctgcccctgggaccagcactgaaccatctgagccaaaaaagaagagaaaggtaatggacaagaagtacagcatcggcctggccatcggcaccaactctgtgggctgggccgtgatcaccgacgagtacaaggtgcccagcaagaaattcaaggtgctgggcaacaccgaccggcacagcatcaagaagaacctgatcggcgccctgctgttcgacagcggagaaacagccgaggccacccggctgaagagaaccgccagaagaagatacaccagacggaagaaccggatctgctatctgcaagagatcttcagcaacgagatggccaaggtggacgacagcttcttccacagactggaagagtccttcctggtggaagaggataagaagcacgagcggcaccccatcttcggcaacatcgtggacgaggtggcctaccacgagaagtaccccaccatctaccacctgagaaagaaactggtggacagcaccgacaaggccgacctgcggctgatctatctggccctggcccacatgatcaagttccggggccacttcctgatcgagggcgacctgaaccccgacaacagcgacgtggacaagctgttcatccagctggtgcagacctacaaccagctgttcgaggaaaaccccatcaacgccagcggcgtggacgccaaggccatcctgtctgccagactgagcaagagcagacggctggaaaatctgatcgcccagctgcccggcgagaagaagaatggcctgttcggcaacctgattgccctgagcctgggcctgacccccaacttcaagagcaacttcgacctggccgaggatgccaaactgcagctgagcaaggacacctacgacgacgacctggacaacctgctggcccagatcggcgaccagtacgccgacctgtttctggccgccaagaacctgtccgacgccatcctgctgagcgacatcctgagagtgaacaccgagatcaccaaggcccccctgagcgcctctatgatcaagagatacgacgagcaccaccaggacctgaccctgctgaaagctctcgtgcggcagcagctgcctgagaagtacaaagagattttcttcgaccagagcaagaacggctacgccggctacatcgatggcggagccagccaggaagagttctacaagttcatcaagcccatcctggaaaagatggacggcaccgaggaactgctcgtgaagctgaacagagaggacctgctgcggaagcagcggaccttcgacaacggcagcatcccccaccagatccacctgggagagctgcacgccattctgcggcggcaggaagatttttacccattcctgaaggacaaccgggaaaagatcgagaagatcctgaccttccgcatcccctactacgtgggccctctggccaggggaaacagcagattcgcctggatgaccagaaagagcgaggaaaccatcaccccctggaacttcgaggaagtggtggacaagggcgccagcgcccagagcttcatcgagcggatgaccaacttcgataagaacctgcccaacgagaaggtgctgcccaagcacagcctgctgtacgagtacttcaccgtgtacaacgagctgaccaaagtgaaatacgtgaccgagggaatgagaaagcccgccttcctgagcggcgagcagaaaaaagccatcgtggacctgctgttcaagaccaaccggaaagtgaccgtgaagcagctgaaagaggactacttcaagaaaatcgagtgcttcgactccgtggaaatctccggcgtggaagatcggttcaacgcctccctgggcacataccacgatctgctgaaaattatcaaggacaaggacttcctggacaatgaggaaaacgaggacattctggaagatatcgtgctgaccctgacactgtttgaggacagagagatgatcgaggaacggctgaaaacctatgcccacctgttcgacgacaaagtgatgaagcagctgaagcggcggagatacaccggctggggcaggctgagccggaagctgatcaacggcatccgggacaagcagtccggcaagacaatcctggatttcctgaagtccgacggcttcgccaacagaaacttcatgcagctgatccacgacgacagcctgacctttaaagaggacatccagaaagcccaggtgtccggccagggcgatagcctgcacgagcacattgccaatctggccggcagccccgccattaagaagggcatcctgcagacagtgaaggtggtggacgagctcgtgaaagtgatgggccggcacaagcccgagaacatcgtgatcgaaatggccagagagaaccagaccacccagaagggacagaagaacagccgcgagagaatgaagcggatcgaagagggcatcaaagagctgggcagccagatcctgaaagaacaccccgtggaaaacacccagctgcagaacgagaagctgtacctgtactacctgcagaatgggcgggatatgtacgtggaccaggaactggacatcaaccggctgtccgactacgatgtggacgctatcgtgcctcagagctttctgaaggacgactccatcgataacaaagtgctgactcggagcgacaagaaccggggcaagagcgacaacgtgccctccgaagaggtcgtgaagaagatgaagaactactggcgccagctgctgaatgccaagctgattacccagaggaagttcgacaatctgaccaaggccgagagaggcggcctgagcgaactggataaggccggcttcatcaagagacagctggtggaaacccggcagatcacaaagcacgtggcacagatcctggactcccggatgaacactaagtacgacgagaacgacaaactgatccgggaagtgaaagtgatcaccctgaagtccaagctggtgtccgatttccggaaggatttccagttttacaaagtgcgcgagatcaacaactaccaccacgcccacgacgcctacctgaacgccgtcgtgggaaccgccctgatcaaaaagtaccctaagctggaaagcgagttcgtgtacggcgactacaaggtgtacgacgtgcggaagatgatcgccaagagcgagcaggaaatcggcaaggctaccgccaagtacttcttctacagcaacatcatgaactttttcaagaccgagattaccctggccaacggcgagatccggaagcggcctctgatcgagacaaacggcgaaacaggcgagatcgtgtgggataagggccgggactttgccaccgtgcggaaagtgctgtctatgccccaagtgaatatcgtgaaaaagaccgaggtgcagacaggcggcttcagcaaagagtctatcctgcccaagaggaacagcgacaagctgatcgccagaaagaaggactgggaccctaagaagtacggcggcttcgacagccccaccgtggcctattctgtgctggtggtggccaaagtggaaaagggcaagtccaagaaactgaagagtgtgaaagagctgctggggatcaccatcatggaaagaagcagcttcgagaagaatcccatcgactttctggaagccaagggctacaaagaagtgaaaaaggacctgatcatcaagctgcctaagtactccctgttcgagctggaaaacggccggaagagaatgctggcctctgccggcgaactgcagaagggaaacgaactggccctgccctccaaatatgtgaacttcctgtacctggccagccactatgagaagctgaagggctcccccgaggataatgagcagaaacagctgtttgtggaacagcacaaacactacctggacgagatcatcgagcagatcagcgagttctccaagagagtgatcctggccgacgctaatctggacaaggtgctgagcgcctacaacaagcacagagacaagcctatcagagagcaggccgagaatatcatccacctgtttaccctgaccaatctgggagcccctgccgccttcaagtactttgacaccaccatcgaccggaagaggtacaccagcaccaaagaggtgctggacgccaccctgatccaccagagcatcaccggcctgtacgagacacggatcgacctgtctcagctgggaggcgacgcctatccctatgacgtgcccgattatgccagcctgggcagcggctcccccaagaaaaaacgcaaggtggaagatcctaagaaaaagcggaaagtggacggcagcggcagcgagacccccggtaccagcgagagcgccacccccgagagccggacactcgccaagaccgtggcctatttctacgaccccgacgtgggcaacttccactacggagctggacaccctatgaagccccatcgcctggcattgacccatagcctggtcctgcattacggtctctataagaagatgatcgtcttcaagccataccaggcctcccaacatgacatgtgccgcttccactccgaggactacattgacttcctgcagagagtcagccccaccaatatgcaaggcttcaccaagagtcttaatgccttcaacgtaggcgatgactgcccagtgtttcccgggctctttgagttctgctcgcgttacacaggcgcatctctgcaaggagcaacccagctgaacaacaagatctgtgatattgccattaactgggctggtggtctgcaccatgccaagaagtttgaggcctctggcttctgctatgtcaacgacattgtgattggcatcctggagctgctcaagtaccaccctcgggtgctctacattgacattgacatccaccatggtgacggggttcaagaagctttctacctcactgaccgggtcatgacggtgtccttccacaaatacggaaattacttcttccctggcacaggtgacatgtatgaagtcggggcagagagtggccgctactactgtctgaacgtgcccctgcgggatggcattgatgaccagagttacaagcaccttttccagccggttatcaaccaggtagtggacttctaccaacccacgtgcattgtgctccagtgtggagctgactctctgggctgtgatcgattgggctgctttaacctcagcatccgagggcatggggaatgcgttgaatatgtcaagagcttcaatatccctctactcgtgctgggtggtggtggttatactgtccgaaatgttgcccgctgctggacatatgagacatcgctgctggtagaagaggccattagtgaggagcttccctatagtgaatacttcgagtactttgccccagacttcacacttcatccagatgtcagcacccgcatcgagaatcagaactcacgccagtatctggaccagatccgccagacaatctttgaaaacctgaagatgctgaaccatgcacctagtgtccagattcatgacgtgcctgcagacctcctgacctatgacaggactgatgaggctgatgcagaggagaggggtcctgaggagaactatagcaggccagaggcacccaatgagttctatgatggagaccatgacaatgacaaggaaagcgatgtggagattgagggcagcggcgctactaacttcagcctgctgaagcaggctggagacgtggaggagaaccctggacctatgcattaatgagatcccaagcacgcagcaatgcagctcaaaacgcttagcctagccacacccccacgggaaacagcagtgattaacctttagcaataaacgaaagtttaactaagctatactaaccccagggttggtcaatttcgtgccagccacaccctggtactgcatgcacgcaatgctagctgcccctttcccgtcctgggcaccccgagtctcccccgaccccgggtcccaggtatgctcccacctccacctgccccactcaccacctctgctagttccagacacctccgagacgaggaaaaaaaaaaaaaaaaaaaaaaaaaaaaaaaaaaaaaaaaaaaaaaaaaaaaaaaaaaaaaaaaaaaaaaaaaaaaaaaaaaaaaaaaaaaaaaaaaaaaaaaaaaaaaaaaaaaaaaaaaaaaaaaaaaaaaaaaaaaaaaaaaaaaaaaaaaaaaaaaaaaaaaaaaaaaaaaaaaaaaaaaaaaaaaaaaaaaaaaaaaaaaaaaaaaaaaaaaaaaaaaaaaaaaaaaaaaaaaaaaaaaaaaaaaaaaaaaaaaaaaaaaaaaaaaaaaaaaaaaaaaaaaaaaaaaaaaaaaaaaaaaaaaaaaaaaaaaaaaaaaaaaaaaaaaaaaaaaaaaaaaaaaaaaaaaaaaaaaaaaaaaaaaaaaaaaaaaaaaaaaaaaaaaaaaaaaccgtcttcaagctttctagaaattcactggccgtcgttttacaacgtcgtgactgggaaaaccctggcgttacccaacttaatcgccttgcagcacatccccctttcgccagctggcgtaatagcgaagaggcccgcaccgatcgcccttcccaacagttgcgcagcctgaatggcgaatggcgcctgatgcggtattttctccttacgcatctgtgcggtatttcacaccgcatatggtgcactctcagtacaatctgctctgatgccgcatagttaagccagccccgacacccgccaacacccgctgacgcgccctgacgggcttgtctgctcccggcatccgcttacagacaagctgtgaccgtctccgggagctgcatgtgtcagaggttttcaccgtcatcaccgaaacgcgcgagacgaaagggcctcgtgatacgcctatttttataggttaatgtcatgataataatggtttcttagacgtcaggtggcacttttcggggaaatgtgcgcggaacccctatttgtttatttttctaaatacattcaaatatgtatccgctcatgagacaataaccctgataaatgcttcaataatattgaaaaaggaagagtatgagtattcaacatttccgtgtcgcccttattcccttttttgcggcattttgccttcctgtttttgctcacccagaaacgctggtgaaagtaaaagatgctgaagatcagttgggtgcacgagtgggttacatcgaactggatctcaacagcggtaagatccttgagagttttcgccccgaagaacgttttccaatgatgagcacttttaaagttctgctatgtggcgcggtattatcccgtattgacgccgggcaagagcaactcggtcgccgcatacactattctcagaatgacttggttgagtactcaccagtcacagaaaagcatcttacggatggcatgacagtaagagaattatgcagtgctgccataaccatgagtgataacactgcggccaacttacttctgacaacgatcggaggaccgaaggagctaaccgcttttttgcacaacatgggggatcatgtaactcgccttgatcgttgggaaccggagctgaatgaagccataccaaacgacgagcgtgacaccacgatgcctgtagcaatggcaacaacgttgcgcaaactattaactggcgaactacttactctagcttcccggcaacaattaatagactggatggaggcggataaagttgcaggaccacttctgcgctcggcccttccggctggctggtttattgctgataaatctggagccggtgagcgtgggtctcgcggtatcattgcagcactggggccagatggtaagccctcccgtatcgtagttatctacacgacggggagtcaggcaactatggatgaacgaaatagacagatcgctgagataggtgcctcactgattaagcattggtaact

SEQ ID NO: 183 - DNA, 10683 bp, synthetic construct
  misc_feature 1..10683: note = V65 DNA
  source 1..10683: mol_type = other DNA
tttgataatctcatgaccaaaatcccttaacgtgagttttcgttccactgagcgtcagaccccgtagaaaagatcaaaggatcttcttgagatcctttttttctgcgcgtaatctgctgcttgcaaacaaaaaaaccaccgctaccagcggtggtttgtttgccggatcaagagctaccaactctttttccgaaggtaactggcttcagcagagcgcagataccaaatactgttcttctagtgtagccgtagttaggccaccacttcaagaactctgtagcaccgcctacatacctcgctctgctaatcctgttaccagtggctgctgccagtggcgataagtcgtgtcttaccgggttggactcaagacgatagttaccggataaggcgcagcggtcgggctgaacggggggttcgtgcacacagcccagcttggagcgaacgacctacaccgaactgagatacctacagcgtgagctatgagaaagcgccacgcttcccgaagggagaaaggcggacaggtatccggtaagcggcagggtcggaacaggagagcgcacgagggagcttccagggggaaacgcctggtatctttatagtcctgtcgggtttcgccacctctgacttgagcgtcgatttttgtgatgctcgtcaggggggcggagcctatggaaaaacgccagcaacgcggcctttttacggttcctggccttttgctggccttttgctcacatgttctttcctgcgttatcccctgattctgtggataaccgtattaccgcctttgagtgagctgataccgctcgccgcagccgaacgaccgagcgcagcgagtcagtgagcgaggaagcggaagagcgcccaatacgcaaaccgcctctccccgcgcgttggccgattcattaatgcagctggcacgacaggtttcccgactggaaagcgggcagtgagcgcaacgcaattaatgtgagttagctcactcattaggcaccccaggctttacactttatgcttccggctcgtatgttgtgtggaattgtgagcggataacaatttcacacaggaaacagctatgaccatgattacgcctctagaaagctttaatacgactcactataaggactcactatttgttttcgcgcccagttgcaaaaagtgtcgacatttgcttctgacacaactgtgttcactagcaacctcaaacagacaccgccaccatgcctgctgctaagagagtgaaactggatggatccaaccatgaccaggaatttgaccccccaaaggtttacccacctgtgccagctgagaagaggaagcccatccgcgtgctgtctctctttgatgggattgctacagggctcctggtgctgaaggacctgggcatccaagtggaccgctacattgcctccgaggtgtgtgaggactccatcacggtgggcatggtgcggcaccagggaaagatcatgtacgtcggggacgtccgcagcgtcacacagaagcatatccaggagtggggcccattcgacctggtgattggaggcagtccctgcaatgacctctccattgtcaaccctgcccgcaagggactttatgagggtactggccgcctcttctttgagttctaccgcctcctgcatgatgcgcggcccaaggagggagatgatcgccccttcttctggctctttgagaatgtggtggccatgggcgttagtgacaagagggacatctcgcgatttcttgagtctaaccccgtgatgattgacgccaaagaagtgtctgctgcacacagggcccgttacttctggggtaaccttcctggcatgaacaggcctttggcatccactgtgaatgataagctggagctgcaagagtgtctggagcacggcagaatagccaagttcagcaaagtgaggaccattaccaccaggtcaaactctataaagcagggcaaagaccagcatttccccgtcttcatgaacgagaaggaggacatcctgtggtgcactgaaatggaaagggtgtttggcttccccgtccactacacagacgtctccaacatgagccgcttggcgaggcagagactgctgggccgatcgtggagcgtgccggtcatccgccacctcttcgctccgctgaaggaatattttgcttgtgtgtctagcggcaatagtaacgctaacagccgcgggccgagcttcagcagcggcctggtgccgttaagcttgcgcggcagccatatgggccctatggagatatacaagacagtgtctgcatggaagagacagccagtgcgggtactgagcctcttcagaaacatcgacaaggtactaaagagtttgggcttcttggaaagcggttctggttctgggggaggaacgctgaagtacgtggaagatgtcacaaatgtcgtgaggagagacgtggagaaatggggcccctttgacctggtgtacggctcgacgcagcccctaggcagctcttgtgatcgctgtcccggctggtacatgttccagttccaccggatcctgcagtatgcgctgcctcgccaggagagtcagcggcccttcttctggatattcatggacaatctgctgctgactgaggatgaccaagagacaactacccgcttccttcagacagaggctgtgaccctccaggatgtccgtggcagagactaccagaatgctatgcgggtgtggagcaacattccagggctgaagagcaagcatgcgcccctgaccccaaaggaagaagagtatctgcaagcccaagtcagaagcaggagcaagctggacgccccgaaagttgacctcctggtgaagaactgccttctcccgctgagagagtacttcaagtatttttctcaaaactcacttcctcttggagggccgagctctggcgcacccccaccaagtggagggtctcctgccgggtccccaacatctactgaagaaggcaccagcgaatccgcaacgcccgagtcaggccctggtacctccacagaaccatctgaaggtagtgcgcctggttccccagctggaagccctacttccaccgaagaaggcacgtcaaccgaaccaagtgaaggatctgcccctgggaccagcactgaaccatctgagccaaaaaagaagagaaaggtaatggacaagaagtacagcatcggcctggccatcggcaccaactctgtgggctgggccgtgatcaccgacgagtacaaggtgcccagcaagaaattcaaggtgctgggcaacaccgaccggcacagcatcaagaagaacctgatcggcgccctgctgttcgacagcggagaaacagccgaggccacccggctgaagagaaccgccagaagaagatacaccagacggaagaaccggatctgctatctgcaagagatcttcagcaacgagatggccaaggtggacgacagcttcttccacagactggaagagtccttcctggtggaagaggataagaagcacgagcggcaccccatcttcggcaacatcgtggacgaggtggcctaccacgagaagtaccccaccatctaccacctgagaaagaaactggtggacagcaccgacaaggccgacctgcggctgatctatctggccctggcccacatgatcaagttccggggccacttcctgatcgagggcgacctgaaccccgacaacagcgacgtggacaagctgttcatccagctggtgcagacctacaaccagctgttcgaggaaaaccccatcaacgccagcggcgtggacgccaaggccatcctgtctgccagactgagcaagagcagacggctggaaaatctgatcgcccagctgcccggcgagaagaagaatggcctgttcggcaacctgattgccctgagcctgggcctgacccccaacttcaagagcaacttcgacctggccgaggatgccaaactgcagctgagcaaggacacctacgacgacgacctggacaacctgctggcccagatcggcgaccagtacgccgacctgtttctggccgccaagaacctgtccgacgccatcctgctgagcgacatcctgagagtgaacaccgagatcaccaaggcccccctgagcgcctctatgatcaagagatacgacgagcaccaccaggacctgaccctgctgaaagctctcgtgcggcagcagctgcctgagaagtacaaagagattttcttcgaccagagcaagaacggctacgccggctacatcgatggcggagccagccaggaagagttctacaagttcatcaagcccatcctggaaaagatggacggcaccgaggaactgctcgtgaagctgaacagagaggacctgctgcggaagcagcggaccttcgacaacggcagcatcccccaccagatccacctgggagagctgcacgccattctgcggcggcaggaagatttttacccattcctgaaggacaaccgggaaaagatcgagaagatcctgaccttccgcatcccctactacgtgggccctctggccaggggaaacagcagattcgcctggatgaccagaaagagcgaggaaaccatcaccccctggaacttcgaggaagtggtggacaagggcgccagcgcccagagcttcatcgagcggatgaccaacttcgataagaacctgcccaacgagaaggtgctgcccaagcacagcctgctgtacgagtacttcaccgtgtacaacgagctgaccaaagtgaaatacgtgaccgagggaatgagaaagcccgccttcctgagcggcgagcagaaaaaagccatcgtggacctgctgttcaagaccaaccggaaagtgaccgtgaagcagctgaaagaggactacttcaagaaaatcgagtgcttcgactccgtggaaatctccggcgtggaagatcggttcaacgcctccctgggcacataccacgatctgctgaaaattatcaaggacaaggacttcctggacaatgaggaaaacgaggacattctggaagatatcgtgctgaccctgacactgtttgaggacagagagatgatcgaggaacggctgaaaacctatgcccacctgttcgacgacaaagtgatgaagcagctgaagcggcggagatacaccggctggggcaggctgagccggaagctgatcaacggcatccgggacaagcagtccggcaagacaatcctggatttcctgaagtccgacggcttcgccaacagaaacttcatgcagctgatccacgacgacagcctgacctttaaagaggacatccagaaagcccaggtgtccggccagggcgatagcctgcacgagcacattgccaatctggccggcagccccgccattaagaagggcatcctgcagacagtgaaggtggtggacgagctcgtgaaagtgatgggccggcacaagcccgagaacatcgtgatcgaaatggccagagagaaccagaccacccagaagggacagaagaacagccgcgagagaatgaagcggatcgaagagggcatcaaagagctgggcagccagatcctgaaagaacaccccgtggaaaacacccagctgcagaacgagaagctgtacctgtactacctgcagaatgggcgggatatgtacgtggaccaggaactggacatcaaccggctgtccgactacgatgtggacgctatcgtgcctcagagctttctgaaggacgactccatcgataacaaagtgctgactcggagcgacaagaaccggggcaagagcgacaacgtgccctccgaagaggtcgtgaagaagatgaagaactactggcgccagctgctgaatgccaagctgattacccagaggaagttcgacaatctgaccaaggccgagagaggcggcctgagcgaactggataaggccggcttcatcaagagacagctggtggaaacccggcagatcacaaagcacgtggcacagatcctggactcccggatgaacactaagtacgacgagaacgacaaactgatccgggaagtgaaagtgatcaccctgaagtccaagctggtgtccgatttccggaaggatttccagttttacaaagtgcgcgagatcaacaactaccaccacgcccacgacgcctacctgaacgccgtcgtgggaaccgccctgatcaaaaagtaccctaagctggaaagcgagttcgtgtacggcgactacaaggtgtacgacgtgcggaagatgatcgccaagagcgagcaggaaatcggcaaggctaccgccaagtacttcttctacagcaacatcatgaactttttcaagaccgagattaccctggccaacggcgagatccggaagcggcctctgatcgagacaaacggcgaaacaggcgagatcgtgtgggataagggccgggactttgccaccgtgcggaaagtgctgtctatgccccaagtgaatatcgtgaaaaagaccgaggtgcagacaggcggcttcagcaaagagtctatcctgcccaagaggaacagcgacaagctgatcgccagaaagaaggactgggaccctaagaagtacggcggcttcgacagccccaccgtggcctattctgtgctggtggtggccaaagtggaaaagggcaagtccaagaaactgaagagtgtgaaagagctgctggggatcaccatcatggaaagaagcagcttcgagaagaatcccatcgactttctggaagccaagggctacaaagaagtgaaaaaggacctgatcatcaagctgcctaagtactccctgttcgagctggaaaacggccggaagagaatgctggcctctgccggcgaactgcagaagggaaacgaactggccctgccctccaaatatgtgaacttcctgtacctggccagccactatgagaagctgaagggctcccccgaggataatgagcagaaacagctgtttgtggaacagcacaaacactacctggacgagatcatcgagcagatcagcgagttctccaagagagtgatcctggccgacgctaatctggacaaggtgctgagcgcctacaacaagcacagagacaagcctatcagagagcaggccgagaatatcatccacctgtttaccctgaccaatctgggagcccctgccgccttcaagtactttgacaccaccatcgaccggaagaggtacaccagcaccaaagaggtgctggacgccaccctgatccaccagagcatcaccggcctgtacgagacacggatcgacctgtctcagctgggaggcgacgcctatccctatgacgtgcccgattatgccagcctgggcagcggctcccccaagaaaaaacgcaaggtggaagatcctaagaaaaagcggaaagtggacggcagcggcagcgagacccccggtaccagcgagagcgccacccccgagagccggacactcgccaagaccgtggcctatttctacgaccccgacgtgggcaacttccactacggagctggacaccctatgaagccccatcgcctggcattgacccatagcctggtcctgcattacggtctctataagaagatgatcgtcttcaagccataccaggcctcccaacatgacatgtgccgcttccactccgaggactacattgacttcctgcagagagtcagccccaccaatatgcaaggcttcaccaagagtcttaatgccttcaacgtaggcgatgactgcccagtgtttcccgggctctttgagttctgctcgcgttacacaggcgcatctctgcaaggagcaacccagctgaacaacaagatctgtgatattgccattaactgggctggtggtctgcaccatgccaagaagtttgaggcctctggcttctgctatgtcaacgacattgtgattggcatcctggagctgctcaagtaccaccctcgggtgctctacattgacattgacatccaccatggtgacggggttcaagaagctttctacctcactgaccgggtcatgacggtgtccttccacaaatacggaaattacttcttccctggcacaggtgacatgtatgaagtcggggcagagagtggccgctactactgtctgaacgtgcccctgcgggatggcattgatgaccagagttacaagcaccttttccagccggttatcaaccaggtagtggacttctaccaacccacgtgcattgtgctccagtgtggagctgactctctgggctgtgatcgattgggctgctttaacctcagcatccgagggcatggggaatgcgttgaatatgtcaagagcttcaatatccctctactcgtgctgggtggtggtggttatactgtccgaaatgttgcccgctgctggacatatgagacatcgctgctggtagaagagggcagcggcgctactaacttcagcctgctgaagcaggctggagacgtggaggagaaccctggacctatgcattaatgagatcccaagcacgcagcaatgcagctcaaaacgcttagcctagccacacccccacgggaaacagcagtgattaacctttagcaataaacgaaagtttaactaagctatactaaccccagggttggtcaatttcgtgccagccacaccctggtactgcatgcacgcaatgctagctgcccctttcccgtcctgggcaccccgagtctcccccgaccccgggtcccaggtatgctcccacctccacctgccccactcaccacctctgctagttccagacacctccgagacgaggaaaaaaaaaaaaaaaaaaaaaaaaaaaaaaaaaaaaaaaaaaaaaaaaaaaaaaaaaaaaaaaaaaaaaaaaaaaaaaaaaaaaaaaaaaaaaaaaaaaaaaaaaaaaaaaaaaaaaaaaaaaaaaaaaaaaaaaaaaaaaaaaaaaaaaaaaaaaaaaaaaaaaaaaaaaaaaaaaaaaaaaaaaaaaaaaaaaaaaaaaaaaaaaaaaaaaaaaaaaaaaaaaaaaaaaaaaaaaaaaaaaaaaaaaaaaaaaaaaaaaaaaaaaaaaaaaaaaaaaaaaaaaaaaaaaaaaaaaaaaaaaaaaaaaaaaaaaaaaaaaaaaaaaaaaaaaaaaaaaaaaaaaaaaaaaaaaaaaaaaaaaaaaaaaaaaaaaaaaaaaaaaaaaaaaaaaaccgtcttcaagctttctagaaattcactggccgtcgttttacaacgtcgtgactgggaaaaccctggcgttacccaacttaatcgccttgcagcacatccccctttcgccagctggcgtaatagcgaagaggcccgcaccgatcgcccttcccaacagttgcgcagcctgaatggcgaatggcgcctgatgcggtattttctccttacgcatctgtgcggtatttcacaccgcatatggtgcactctcagtacaatctgctctgatgccgcatagttaagccagccccgacacccgccaacacccgctgacgcgccctgacgggcttgtctgctcccggcatccgcttacagacaagctgtgaccgtctccgggagctgcatgtgtcagaggttttcaccgtcatcaccgaaacgcgcgagacgaaagggcctcgtgatacgcctatttttataggttaatgtcatgataataatggtttcttagacgtcaggtggcacttttcggggaaatgtgcgcggaacccctatttgtttatttttctaaatacattcaaatatgtatccgctcatgagacaataaccctgataaatgcttcaataatattgaaaaaggaagagtatgagtattcaacatttccgtgtcgcccttattcccttttttgcggcattttgccttcctgtttttgctcacccagaaacgctggtgaaagtaaaagatgctgaagatcagttgggtgcacgagtgggttacatcgaactggatctcaacagcggtaagatccttgagagttttcgccccgaagaacgttttccaatgatgagcacttttaaagttctgctatgtggcgcggtattatcccgtattgacgccgggcaagagcaactcggtcgccgcatacactattctcagaatgacttggttgagtactcaccagtcacagaaaagcatcttacggatggcatgacagtaagagaattatgcagtgctgccataaccatgagtgataacactgcggccaacttacttctgacaacgatcggaggaccgaaggagctaaccgcttttttgcacaacatgggggatcatgtaactcgccttgatcgttgggaaccggagctgaatgaagccataccaaacgacgagcgtgacaccacgatgcctgtagcaatggcaacaacgttgcgcaaactattaactggcgaactacttactctagcttcccggcaacaattaatagactggatggaggcggataaagttgcaggaccacttctgcgctcggcccttccggctggctggtttattgctgataaatctggagccggtgagcgtgggtctcgcggtatcattgcagcactggggccagatggtaagccctcccgtatcgtagttatctacacgacggggagtcaggcaactatggatgaacgaaatagacagatcgctgagataggtgcctcactgattaagcattggtaactgtcagaccaagtttactcatatatactttagattgatttaaaacttcatttttaatttaaaaggatctaggtgaagatcctt

SEQ ID NO: 184 - DNA, 10833 bp, synthetic construct
  misc_feature 1..10833: note = V66 DNA
  source 1..10833: mol_type = other DNA
gtgaagatcctttttgataatctcatgaccaaaatcccttaacgtgagttttcgttccactgagcgtcagaccccgtagaaaagatcaaaggatcttcttgagatcctttttttctgcgcgtaatctgctgcttgcaaacaaaaaaaccaccgctaccagcggtggtttgtttgccggatcaagagctaccaactctttttccgaaggtaactggcttcagcagagcgcagataccaaatactgttcttctagtgtagccgtagttaggccaccacttcaagaactctgtagcaccgcctacatacctcgctctgctaatcctgttaccagtggctgctgccagtggcgataagtcgtgtcttaccgggttggactcaagacgatagttaccggataaggcgcagcggtcgggctgaacggggggttcgtgcacacagcccagcttggagcgaacgacctacaccgaactgagatacctacagcgtgagctatgagaaagcgccacgcttcccgaagggagaaaggcggacaggtatccggtaagcggcagggtcggaacaggagagcgcacgagggagcttccagggggaaacgcctggtatctttatagtcctgtcgggtttcgccacctctgacttgagcgtcgatttttgtgatgctcgtcaggggggcggagcctatggaaaaacgccagcaacgcggcctttttacggttcctggccttttgctggccttttgctcacatgttctttcctgcgttatcccctgattctgtggataaccgtattaccgcctttgagtgagctgataccgctcgccgcagccgaacgaccgagcgcagcgagtcagtgagcgaggaagcggaagagcgcccaatacgcaaaccgcctctccccgcgcgttggccgattcattaatgcagctggcacgacaggtttcccgactggaaagcgggcagtgagcgcaacgcaattaatgtgagttagctcactcattaggcaccccaggctttacactttatgcttccggctcgtatgttgtgtggaattgtgagcggataacaatttcacacaggaaacagctatgaccatgattacgcctctagaaagctttaatacgactcactataaggactcactatttgttttcgcgcccagttgcaaaaagtgtcgacatttgcttctgacacaactgtgttcactagcaacctcaaacagacaccgccaccatgcctgctgctaagagagtgaaactggatggatccaaccatgaccaggaatttgaccccccaaaggtttacccacctgtgccagctgagaagaggaagcccatccgcgtgctgtctctctttgatgggattgctacagggctcctggtgctgaaggacctgggcatccaagtggaccgctacattgcctccgaggtgtgtgaggactccatcacggtgggcatggtgcggcaccagggaaagatcatgtacgtcggggacgtccgcagcgtcacacagaagcatatccaggagtggggcccattcgacctggtgattggaggcagtccctgcaatgacctctccattgtcaaccctgcccgcaagggactttatgagggtactggccgcctcttctttgagttctaccgcctcctgcatgatgcgcggcccaaggagggagatgatcgccccttcttctggctctttgagaatgtggtggccatgggcgttagtgacaagagggacatctcgcgatttcttgagtctaaccccgtgatgattgacgccaaagaagtgtctgctgcacacagggcccgttacttctggggtaaccttcctggcatgaacaggcctttggcatccactgtgaatgataagctggagctgcaagagtgtctggagcacggcagaatagccaagttcagcaaagtgaggaccattaccaccaggtcaaactctataaagcagggcaaagaccagcatttccccgtcttcatgaacgagaaggaggacatcctgtggtgcactgaaatggaaagggtgtttggcttccccgtccactacacagacgtctccaacatgagccgcttggcgaggcagagactgctgggccgatcgtggagcgtgccggtcatccgccacctcttcgctccgctgaaggaatattttgcttgtgtgtctagcggcaatagtaacgctaacagccgcgggccgagcttcagcagcggcctggtgccgttaagcttgcgcggcagccatatgggccctatggagatatacaagacagtgtctgcatggaagagacagccagtgcgggtactgagcctcttcagaaacatcgacaaggtactaaagagtttgggcttcttggaaagcggttctggttctgggggaggaacgctgaagtacgtggaagatgtcacaaatgtcgtgaggagagacgtggagaaatggggcccctttgacctggtgtacggctcgacgcagcccctaggcagctcttgtgatcgctgtcccggctggtacatgttccagttccaccggatcctgcagtatgcgctgcctcgccaggagagtcagcggcccttcttctggatattcatggacaatctgctgctgactgaggatgaccaagagacaactacccgcttccttcagacagaggctgtgaccctccaggatgtccgtggcagagactaccagaatgctatgcgggtgtggagcaacattccagggctgaagagcaagcatgcgcccctgaccccaaaggaagaagagtatctgcaagcccaagtcagaagcaggagcaagctggacgccccgaaagttgacctcctggtgaagaactgccttctcccgctgagagagtacttcaagtatttttctcaaaactcacttcctcttggagggccgagctctggcgcacccccaccaagtggagggtctcctgccgggtccccaacatctactgaagaaggcaccagcgaatccgcaacgcccgagtcaggccctggtacctccacagaaccatctgaaggtagtgcgcctggttccccagctggaagccctacttccaccgaagaaggcacgtcaaccgaaccaagtgaaggatctgcccctgggaccagcactgaaccatctgagccaaaaaagaagagaaaggtaatggacaagaagtacagcatcggcctggccatcggcaccaactctgtgggctgggccgtgatcaccgacgagtacaaggtgcccagcaagaaattcaaggtgctgggcaacaccgaccggcacagcatcaagaagaacctgatcggcgccctgctgttcgacagcggagaaacagccgaggccacccggctgaagagaaccgccagaagaagatacaccagacggaagaaccggatctgctatctgcaagagatcttcagcaacgagatggccaaggtggacgacagcttcttccacagactggaagagtccttcctggtggaagaggataagaagcacgagcggcaccccatcttcggcaacatcgtggacgaggtggcctaccacgagaagtaccccaccatctaccacctgagaaagaaactggtggacagcaccgacaaggccgacctgcggctgatctatctggccctggcccacatgatcaagttccggggccacttcctgatcgagggcgacctgaaccccgacaacagcgacgtggacaagctgttcatccagctggtgcagacctacaaccagctgttcgaggaaaaccccatcaacgccagcggcgtggacgccaaggccatcctgtctgccagactgagcaagagcagacggctggaaaatctgatcgcccagctgcccggcgagaagaagaatggcctgttcggcaacctgattgccctgagcctgggcctgacccccaacttcaagagcaacttcgacctggccgaggatgccaaactgcagctgagcaaggacacctacgacgacgacctggacaacctgctggcccagatcggcgaccagtacgccgacctgtttctggccgccaagaacctgtccgacgccatcctgctgagcgacatcctgagagtgaacaccgagatcaccaaggcccccctgagcgcctctatgatcaagagatacgacgagcaccaccaggacctgaccctgctgaaagctctcgtgcggcagcagctgcctgagaagtacaaagagattttcttcgaccagagcaagaacggctacgccggctacatcgatggcggagccagccaggaagagttctacaagttcatcaagcccatcctggaaaagatggacggcaccgaggaactgctcgtgaagctgaacagagaggacctgctgcggaagcagcggaccttcgacaacggcagcatcccccaccagatccacctgggagagctgcacgccattctgcggcggcaggaagatttttacccattcctgaaggacaaccgggaaaagatcgagaagatcctgaccttccgcatcccctactacgtgggccctctggccaggggaaacagcagattcgcctggatgaccagaaagagcgaggaaaccatcaccccctggaacttcgaggaagtggtggacaagggcgccagcgcccagagcttcatcgagcggatgaccaacttcgataagaacctgcccaacgagaaggtgctgcccaagcacagcctgctgtacgagtacttcaccgtgtacaacgagctgaccaaagtgaaatacgtgaccgagggaatgagaaagcccgccttcctgagcggcgagcagaaaaaagccatcgtggacctgctgttcaagaccaaccggaaagtgaccgtgaagcagctgaaagaggactacttcaagaaaatcgagtgcttcgactccgtggaaatctccggcgtggaagatcggttcaacgcctccctgggcacataccacgatctgctgaaaattatcaaggacaaggacttcctggacaatgaggaaaacgaggacattctggaagatatcgtgctgaccctgacactgtttgaggacagagagatgatcgaggaacggctgaaaacctatgcccacctgttcgacgacaaagtgatgaagcagctgaagcggcggagatacaccggctggggcaggctgagccggaagctgatcaacggcatccgggacaagcagtccggcaagacaatcctggatttcctgaagtccgacggcttcgccaacagaaacttcatgcagctgatccacgacgacagcctgacctttaaagaggacatccagaaagcccaggtgtccggccagggcgatagcctgcacgagcacattgccaatctggccggcagccccgccattaagaagggcatcctgcagacagtgaaggtggtggacgagctcgtgaaagtgatgggccggcacaagcccgagaacatcgtgatcgaaatggccagagagaaccagaccacccagaagggacagaagaacagccgcgagagaatgaagcggatcgaagagggcatcaaagagctgggcagccagatcctgaaagaacaccccgtggaaaacacccagctgcagaacgagaagctgtacctgtactacctgcagaatgggcgggatatgtacgtggaccaggaactggacatcaaccggctgtccgactacgatgtggacgctatcgtgcctcagagctttctgaaggacgactccatcgataacaaagtgctgactcggagcgacaagaaccggggcaagagcgacaacgtgccctccgaagaggtcgtgaagaagatgaagaactactggcgccagctgctgaatgccaagctgattacccagaggaagttcgacaatctgaccaaggccgagagaggcggcctgagcgaactggataaggccggcttcatcaagagacagctggtggaaacccggcagatcacaaagcacgtggcacagatcctggactcccggatgaacactaagtacgacgagaacgacaaactgatccgggaagtgaaagtgatcaccctgaagtccaagctggtgtccgatttccggaaggatttccagttttacaaagtgcgcgagatcaacaactaccaccacgcccacgacgcctacctgaacgccgtcgtgggaaccgccctgatcaaaaagtaccctaagctggaaagcgagttcgtgtacggcgactacaaggtgtacgacgtgcggaagatgatcgccaagagcgagcaggaaatcggcaaggctaccgccaagtacttcttctacagcaacatcatgaactttttcaagaccgagattaccctggccaacggcgagatccggaagcggcctctgatcgagacaaacggcgaaacaggcgagatcgtgtgggataagggccgggactttgccaccgtgcggaaagtgctgtctatgccccaagtgaatatcgtgaaaaagaccgaggtgcagacaggcggcttcagcaaagagtctatcctgcccaagaggaacagcgacaagctgatcgccagaaagaaggactgggaccctaagaagtacggcggcttcgacagccccaccgtggcctattctgtgctggtggtggccaaagtggaaaagggcaagtccaagaaactgaagagtgtgaaagagctgctggggatcaccatcatggaaagaagcagcttcgagaagaatcccatcgactttctggaagccaagggctacaaagaagtgaaaaaggacctgatcatcaagctgcctaagtactccctgttcgagctggaaaacggccggaagagaatgctggcctctgccggcgaactgcagaagggaaacgaactggccctgccctccaaatatgtgaacttcctgtacctggccagccactatgagaagctgaagggctcccccgaggataatgagcagaaacagctgtttgtggaacagcacaaacactacctggacgagatcatcgagcagatcagcgagttctccaagagagtgatcctggccgacgctaatctggacaaggtgctgagcgcctacaacaagcacagagacaagcctatcagagagcaggccgagaatatcatccacctgtttaccctgaccaatctgggagcccctgccgccttcaagtactttgacaccaccatcgaccggaagaggtacaccagcaccaaagaggtgctggacgccaccctgatccaccagagcatcaccggcctgtacgagacacggatcgacctgtctcagctgggaggcgacgcctatccctatgacgtgcccgattatgccagcctgggcagcggctcccccaagaaaaaacgcaaggtggaagatcctaagaaaaagcggaaagtggacggcagcggcagcgagacccccggtaccagcgagagcgccacccccgagagccggacactcgccaagaccgtggcctatttctacgaccccgacgtgggcaacttccactacggagctggacaccctatgaagccccatcgcctggcattgacccatagcctggtcctgcattacggtctctataagaagatgatcgtcttcaagccataccaggcctcccaacatgacatgtgccgcttccactccgaggactacattgacttcctgcagagagtcagccccaccaatatgcaaggcttcaccaagagtcttaatgccttcaacgtaggcgatgactgcccagtgtttcccgggctctttgagttctgctcgcgttacacaggcgcatctctgcaaggagcaacccagctgaacaacaagatctgtgatattgccattaactgggctggtggtctgcaccatgccaagaagtttgaggcctctggcttctgctatgtcaacgacattgtgattggcatcctggagctgctcaagtaccaccctcgggtgctctacattgacattgacatccaccatggtgacggggttcaagaagctttctacctcactgaccgggtcatgacggtgtccttccacaaatacggaaattacttcttccctggcacaggtgacatgtatgaagtcggggcagagagtggccgctactactgtctgaacgtgcccctgcgggatggcattgatgaccagagttacaagcaccttttccagccggttatcaaccaggtagtggacttctaccaacccacgtgcattgtgctccagtgtggagctgactctctgggctgtgatcgattgggctgctttaacctcagcatccgagggcatggggaatgcgttgaatatgtcaagagcttcaatatccctctactcgtgctgggtggtggtggttatactgtccgaaatgttgcccgctgctggacatatgagacatcgctgctggtagaagaggccattagtgaggagcttccctatagtgaatacttcgagtactttgccccagacttcacacttcatccagatgtcagcacccgcatcgagaatcagaactcacgccagtatctggaccagatccgccagacaatctttgaaaacctggagggcagcggcgctactaacttcagcctgctgaagcaggctggagacgtggaggagaaccctggacctatgcattaatgagatcccaagcacgcagcaatgcagctcaaaacgcttagcctagccacacccccacgggaaacagcagtgattaacctttagcaataaacgaaagtttaactaagctatactaaccccagggttggtcaatttcgtgccagccacaccctggtactgcatgcacgcaatgctagctgcccctttcccgtcctgggcaccccgagtctcccccgaccccgggtcccaggtatgctcccacctccacctgccccactcaccacctctgctagttccagacacctccgagacgaggaaaaaaaaaaaaaaaaaaaaaaaaaaaaaaaaaaaaaaaaaaaaaaaaaaaaaaaaaaaaaaaaaaaaaaaaaaaaaaaaaaaaaaaaaaaaaaaaaaaaaaaaaaaaaaaaaaaaaaaaaaaaaaaaaaaaaaaaaaaaaaaaaaaaaaaaaaaaaaaaaaaaaaaaaaaaaaaaaaaaaaaaaaaaaaaaaaaaaaaaaaaaaaaaaaaaaaaaaaaaaaaaaaaaaaaaaaaaaaaaaaaaaaaaaaaaaaaaaaaaaaaaaaaaaaaaaaaaaaaaaaaaaaaaaaaaaaaaaaaaaaaaaaaaaaaaaaaaaaaaaaaaaaaaaaaaaaaaaaaaaaaaaaaaaaaaaaaaaaaaaaaaaaaaaaaaaaaaaaaaaaaaaaaaaaaaaaccgtcttcaagctttctagaaattcactggccgtcgttttacaacgtcgtgactgggaaaaccctggcgttacccaacttaatcgccttgcagcacatccccctttcgccagctggcgtaatagcgaagaggcccgcaccgatcgcccttcccaacagttgcgcagcctgaatggcgaatggcgcctgatgcggtattttctccttacgcatctgtgcggtatttcacaccgcatatggtgcactctcagtacaatctgctctgatgccgcatagttaagccagccccgacacccgccaacacccgctgacgcgccctgacgggcttgtctgctcccggcatccgcttacagacaagctgtgaccgtctccgggagctgcatgtgtcagaggttttcaccgtcatcaccgaaacgcgcgagacgaaagggcctcgtgatacgcctatttttataggttaatgtcatgataataatggtttcttagacgtcaggtggcacttttcggggaaatgtgcgcggaacccctatttgtttatttttctaaatacattcaaatatgtatccgctcatgagacaataaccctgataaatgcttcaataatattgaaaaaggaagagtatgagtattcaacatttccgtgtcgcccttattcccttttttgcggcattttgccttcctgtttttgctcacccagaaacgctggtgaaagtaaaagatgctgaagatcagttgggtgcacgagtgggttacatcgaactggatctcaacagcggtaagatccttgagagttttcgccccgaagaacgttttccaatgatgagcacttttaaagttctgctatgtggcgcggtattatcccgtattgacgccgggcaagagcaactcggtcgccgcatacactattctcagaatgacttggttgagtactcaccagtcacagaaaagcatcttacggatggcatgacagtaagagaattatgcagtgctgccataaccatgagtgataacactgcggccaacttacttctgacaacgatcggaggaccgaaggagctaaccgcttttttgcacaacatgggggatcatgtaactcgccttgatcgttgggaaccggagctgaatgaagccataccaaacgacgagcgtgacaccacgatgcctgtagcaatggcaacaacgttgcgcaaactattaactggcgaactacttactctagcttcccggcaacaattaatagactggatggaggcggataaagttgcaggaccacttctgcgctcggcccttccggctggctggtttattgctgataaatctggagccggtgagcgtgggtctcgcggtatcattgcagcactggggccagatggtaagccctcccgtatcgtagttatctacacgacggggagtcaggcaactatggatgaacgaaatagacagatcgctgagataggtgcctcactgattaagcattggtaactgtcagaccaagtttactcatatatactttagattgatttaaaacttcatttttaatttaaaaggatctag

SEQ ID NO: 185 - DNA, 10629 bp, synthetic construct
  misc_feature 1..10629: note = V67 DNA
  source 1..10629: mol_type = other DNA
ttaacgtgagttttcgttccactgagcgtcagaccccgtagaaaagatcaaaggatcttcttgagatcctttttttctgcgcgtaatctgctgcttgcaaacaaaaaaaccaccgctaccagcggtggtttgtttgccggatcaagagctaccaactctttttccgaaggtaactggcttcagcagagcgcagataccaaatactgttcttctagtgtagccgtagttaggccaccacttcaagaactctgtagcaccgcctacatacctcgctctgctaatcctgttaccagtggctgctgccagtggcgataagtcgtgtcttaccgggttggactcaagacgatagttaccggataaggcgcagcggtcgggctgaacggggggttcgtgcacacagcccagcttggagcgaacgacctacaccgaactgagatacctacagcgtgagctatgagaaagcgccacgcttcccgaagggagaaaggcggacaggtatccggtaagcggcagggtcggaacaggagagcgcacgagggagcttccagggggaaacgcctggtatctttatagtcctgtcgggtttcgccacctctgacttgagcgtcgatttttgtgatgctcgtcaggggggcggagcctatggaaaaacgccagcaacgcggcctttttacggttcctggccttttgctggccttttgctcacatgttctttcctgcgttatcccctgattctgtggataaccgtattaccgcctttgagtgagctgataccgctcgccgcagccgaacgaccgagcgcagcgagtcagtgagcgaggaagcggaagagcgcccaatacgcaaaccgcctctccccgcgcgttggccgattcattaatgcagctggcacgacaggtttcccgactggaaagcgggcagtgagcgcaacgcaattaatgtgagttagctcactcattaggcaccccaggctttacactttatgcttccggctcgtatgttgtgtggaattgtgagcggataacaatttcacacaggaaacagctatgaccatgattacgcctctagaaagctttaatacgactcactataaggactcactatttgttttcgcgcccagttgcaaaaagtgtcgacatttgcttctgacacaactgtgttcactagcaacctcaaacagacaccgccaccatgcctgctgctaagagagtgaaactggatggatccaaccatgaccaggaatttgaccccccaaaggtttacccacctgtgccagctgagaagaggaagcccatccgcgtgctgtctctctttgatgggattgctacagggctcctggtgctgaaggacctgggcatccaagtggaccgctacattgcctccgaggtgtgtgaggactccatcacggtgggcatggtgcggcaccagggaaagatcatgtacgtcggggacgtccgcagcgtcacacagaagcatatccaggagtggggcccattcgacctggtgattggaggcagtccctgcaatgacctctccattgtcaaccctgcccgcaagggactttatgagggtactggccgcctcttctttgagttctaccgcctcctgcatgatgcgcggcccaaggagggagatgatcgccccttcttctggctctttgagaatgtggtggccatgggcgttagtgacaagagggacatctcgcgatttcttgagtctaaccccgtgatgattgacgccaaagaagtgtctgctgcacacagggcccgttacttctggggtaaccttcctggcatgaacaggcctttggcatccactgtgaatgataagctggagctgcaagagtgtctggagcacggcagaatagccaagttcagcaaagtgaggaccattaccaccaggtcaaactctataaagcagggcaaagaccagcatttccccgtcttcatgaacgagaaggaggacatcctgtggtgcactgaaatggaaagggtgtttggcttccccgtccactacacagacgtctccaacatgagccgcttggcgaggcagagactgctgggccgatcgtggagcgtgccggtcatccgccacctcttcgctccgctgaaggaatattttgcttgtgtgtctagcggcaatagtaacgctaacagccgcgggccgagcttcagcagcggcctggtgccgttaagcttgcgcggcagccatatgggccctatggagatatacaagacagtgtctgcatggaagagacagccagtgcgggtactgagcctcttcagaaacatcgacaaggtactaaagagtttgggcttcttggaaagcggttctggttctgggggaggaacgctgaagtacgtggaagatgtcacaaatgtcgtgaggagagacgtggagaaatggggcccctttgacctggtgtacggctcgacgcagcccctaggcagctcttgtgatcgctgtcccggctggtacatgttccagttccaccggatcctgcagtatgcgctgcctcgccaggagagtcagcggcccttcttctggatattcatggacaatctgctgctgactgaggatgaccaagagacaactacccgcttccttcagacagaggctgtgaccctccaggatgtccgtggcagagactaccagaatgctatgcgggtgtggagcaacattccagggctgaagagcaagcatgcgcccctgaccccaaaggaagaagagtatctgcaagcccaagtcagaagcaggagcaagctggacgccccgaaagttgacctcctggtgaagaactgccttctcccgctgagagagtacttcaagtatttttctcaaaactcacttcctcttggagggccgagctctggcgcacccccaccaagtggagggtctcctgccgggtccccaacatctactgaagaaggcaccagcgaatccgcaacgcccgagtcaggccctggtacctccacagaaccatctgaaggtagtgcgcctggttccccagctggaagccctacttccaccgaagaaggcacgtcaaccgaaccaagtgaaggatctgcccctgggaccagcactgaaccatctgagccaaaaaagaagagaaaggtaatggacaagaagtacagcatcggcctggccatcggcaccaactctgtgggctgggccgtgatcaccgacgagtacaaggtgcccagcaagaaattcaaggtgctgggcaacaccgaccggcacagcatcaagaagaacctgatcggcgccctgctgttcgacagcggagaaacagccgaggccacccggctgaagagaaccgccagaagaagatacaccagacggaagaaccggatctgctatctgcaagagatcttcagcaacgagatggccaaggtggacgacagcttcttccacagactggaagagtccttcctggtggaagaggataagaagcacgagcggcaccccatcttcggcaacatcgtggacgaggtggcctaccacgagaagtaccccaccatctaccacctgagaaagaaactggtggacagcaccgacaaggccgacctgcggctgatctatctggccctggcccacatgatcaagttccggggccacttcctgatcgagggcgacctgaaccccgacaacagcgacgtggacaagctgttcatccagctggtgcagacctacaaccagctgttcgaggaaaaccccatcaacgccagcggcgtggacgccaaggccatcctgtctgccagactgagcaagagcagacggctggaaaatctgatcgcccagctgcccggcgagaagaagaatggcctgttcggcaacctgattgccctgagcctgggcctgacccccaacttcaagagcaacttcgacctggccgaggatgccaaactgcagctgagcaaggacacctacgacgacgacctggacaacctgctggcccagatcggcgaccagtacgccgacctgtttctggccgccaagaacctgtccgacgccatcctgctgagcgacatcctgagagtgaacaccgagatcaccaaggcccccctgagcgcctctatgatcaagagatacgacgagcaccaccaggacctgaccctgctgaaagctctcgtgcggcagcagctgcctgagaagtacaaagagattttcttcgaccagagcaagaacggctacgccggctacatcgatggcggagccagccaggaagagttctacaagttcatcaagcccatcctggaaaagatggacggcaccgaggaactgctcgtgaagctgaacagagaggacctgctgcggaagcagcggaccttcgacaacggcagcatcccccaccagatccacctgggagagctgcacgccattctgcggcggcaggaagatttttacccattcctgaaggacaaccgggaaaagatcgagaagatcctgaccttccgcatcccctactacgtgggccctctggccaggggaaacagcagattcgcctggatgaccagaaagagcgaggaaaccatcaccccctggaacttcgaggaagtggtggacaagggcgccagcgcccagagcttcatcgagcggatgaccaacttcgataagaacctgcccaacgagaaggtgctgcccaagcacagcctgctgtacgagtacttcaccgtgtacaacgagctgaccaaagtgaaatacgtgaccgagggaatgagaaagcccgccttcctgagcggcgagcagaaaaaagccatcgtggacctgctgttcaagaccaaccggaaagtgaccgtgaagcagctgaaagaggactacttcaagaaaatcgagtgcttcgactccgtggaaatctccggcgtggaagatcggttcaacgcctccctgggcacataccacgatctgctgaaaattatcaaggacaaggacttcctggacaatgaggaaaacgaggacattctggaagatatcgtgctgaccctgacactgtttgaggacagagagatgatcgaggaacggctgaaaacctatgcccacctgttcgacgacaaagtgatgaagcagctgaagcggcggagatacaccggctggggcaggctgagccggaagctgatcaacggcatccgggacaagcagtccggcaagacaatcctggatttcctgaagtccgacggcttcgccaacagaaacttcatgcagctgatccacgacgacagcctgacctttaaagaggacatccagaaagcccaggtgtccggccagggcgatagcctgcacgagcacattgccaatctggccggcagccccgccattaagaagggcatcctgcagacagtgaaggtggtggacgagctcgtgaaagtgatgggccggcacaagcccgagaacatcgtgatcgaaatggccagagagaaccagaccacccagaagggacagaagaacagccgcgagagaatgaagcggatcgaagagggcatcaaagagctgggcagccagatcctgaaagaacaccccgtggaaaacacccagctgcagaacgagaagctgtacctgtactacctgcagaatgggcgggatatgtacgtggaccaggaactggacatcaaccggctgtccgactacgatgtggacgctatcgtgcctcagagctttctgaaggacgactccatcgataacaaagtgctgactcggagcgacaagaaccggggcaagagcgacaacgtgccctccgaagaggtcgtgaagaagatgaagaactactggcgccagctgctgaatgccaagctgattacccagaggaagttcgacaatctgaccaaggccgagagaggcggcctgagcgaactggataaggccggcttcatcaagagacagctggtggaaacccggcagatcacaaagcacgtggcacagatcctggactcccggatgaacactaagtacgacgagaacgacaaactgatccgggaagtgaaagtgatcaccctgaagtccaagctggtgtccgatttccggaaggatttccagttttacaaagtgcgcgagatcaacaactaccaccacgcccacgacgcctacctgaacgccgtcgtgggaaccgccctgatcaaaaagtaccctaagctggaaagcgagttcgtgtacggcgactacaaggtgtacgacgtgcggaagatgatcgccaagagcgagcaggaaatcggcaaggctaccgccaagtacttcttctacagcaacatcatgaactttttcaagaccgagattaccctggccaacggcgagatccggaagcggcctctgatcgagacaaacggcgaaacaggcgagatcgtgtgggataagggccgggactttgccaccgtgcggaaagtgctgtctatgccccaagtgaatatcgtgaaaaagaccgaggtgcagacaggcggcttcagcaaagagtctatcctgcccaagaggaacagcgacaagctgatcgccagaaagaaggactgggaccctaagaagtacggcggcttcgacagccccaccgtggcctattctgtgctggtggtggccaaagtggaaaagggcaagtccaagaaactgaagagtgtgaaagagctgctggggatcaccatcatggaaagaagcagcttcgagaagaatcccatcgactttctggaagccaagggctacaaagaagtgaaaaaggacctgatcatcaagctgcctaagtactccctgttcgagctggaaaacggccggaagagaatgctggcctctgccggcgaactgcagaagggaaacgaactggccctgccctccaaatatgtgaacttcctgtacctggccagccactatgagaagctgaagggctcccccgaggataatgagcagaaacagctgtttgtggaacagcacaaacactacctggacgagatcatcgagcagatcagcgagttctccaagagagtgatcctggccgacgctaatctggacaaggtgctgagcgcctacaacaagcacagagacaagcctatcagagagcaggccgagaatatcatccacctgtttaccctgaccaatctgggagcccctgccgccttcaagtactttgacaccaccatcgaccggaagaggtacaccagcaccaaagaggtgctggacgccaccctgatccaccagagcatcaccggcctgtacgagacacggatcgacctgtctcagctgggaggcgacgcctatccctatgacgtgcccgattatgccagcctgggcagcggctcccccaagaaaaaacgcaaggtggaagatcctaagaaaaagcggaaagtggacggcagcggcagcgagacccccggtaccagcgagagcgccacccccgagagccggacaaatcgggccatccgcacagagaagatcatctgccgggacgtggctcggggctatgagaacgtgcccattccctgtgtcaacggtgtggatggggagccctgccctgaggattacaagtacatctcagagaactgcgagacgtccaccatgaacatcgatcgcaacatcacccacctgcagcactgcacgtgtgtggacgactgctctagctccaactgcctgtgcggccagctcagcatccggtgctggtatgacaaggatgggcgattgctccaggaatttaacaagattgagcctccgctgattttcgagtgtaaccaggcgtgctcatgctggagaaactgcaagaaccgggtcgtacagagtggcatcaaggtgcggctacagctctaccgaacagccaagatgggctggggggtccgcgccctgcagaccatcccacaggggaccttcatctgcgagtatgtcggggagctgatctctgatgctgaggctgatgtgagagaggatgattcttacctcttcgacttagacaacaaggatggagaggtgtactgcatagatgcccgttactatggcaacatcagccgcttcatcaaccacctgtgtgaccccaacatcattcccgtccgggtcttcatgctgcaccaagacctgcgatttccacgcatcgccttcttcagttcccgagacatccggactggggaggagctagggtttgactatggcgaccgcttctgggacatcaaaagcaaatatttcacctgccaatgtggctctgagaagtgcaagcactcagccgaagccattgccctggagcagagccgtctggcccgcctggacccacaccctgagctgctgcccgagctcggctccctgccccctgtcaacacagagggcagcggcgctactaacttcagcctgctgaagcaggctggagacgtggaggagaaccctggacctatgcattaatgagatcccaagcacgcagcaatgcagctcaaaacgcttagcctagccacacccccacgggaaacagcagtgattaacctttagcaataaacgaaagtttaactaagctatactaaccccagggttggtcaatttcgtgccagccacaccctggtactgcatgcacgcaatgctagctgcccctttcccgtcctgggcaccccgagtctcccccgaccccgggtcccaggtatgctcccacctccacctgccccactcaccacctctgctagttccagacacctccgagacgaggaaaaaaaaaaaaaaaaaaaaaaaaaaaaaaaaaaaaaaaaaaaaaaaaaaaaaaaaaaaaaaaaaaaaaaaaaaaaaaaaaaaaaaaaaaaaaaaaaaaaaaaaaaaaaaaaaaaaaaaaaaaaaaaaaaaaaaaaaaaaaaaaaaaaaaaaaaaaaaaaaaaaaaaaaaaaaaaaaaaaaaaaaaaaaaaaaaaaaaaaaaaaaaaaaaaaaaaaaaaaaaaaaaaaaaaaaaaaaaaaaaaaaaaaaaaaaaaaaaaaaaaaaaaaaaaaaaaaaaaaaaaaaaaaaaaaaaaaaaaaaaaaaaaaaaaaaaaaaaaaaaaaaaaaaaaaaaaaaaaaaaaaaaaaaaaaaaaaaaaaaaaaaaaaaaaaaaaaaaaaaaaaaaaaaaaaaaccgtcttcaagctttctagaaattcactggccgtcgttttacaacgtcgtgactgggaaaaccctggcgttacccaacttaatcgccttgcagcacatccccctttcgccagctggcgtaatagcgaagaggcccgcaccgatcgcccttcccaacagttgcgcagcctgaatggcgaatggcgcctgatgcggtattttctccttacgcatctgtgcggtatttcacaccgcatatggtgcactctcagtacaatctgctctgatgccgcatagttaagccagccccgacacccgccaacacccgctgacgcgccctgacgggcttgtctgctcccggcatccgcttacagacaagctgtgaccgtctccgggagctgcatgtgtcagaggttttcaccgtcatcaccgaaacgcgcgagacgaaagggcctcgtgatacgcctatttttataggttaatgtcatgataataatggtttcttagacgtcaggtggcacttttcggggaaatgtgcgcggaacccctatttgtttatttttctaaatacattcaaatatgtatccgctcatgagacaataaccctgataaatgcttcaataatattgaaaaaggaagagtatgagtattcaacatttccgtgtcgcccttattcccttttttgcggcattttgccttcctgtttttgctcacccagaaacgctggtgaaagtaaaagatgctgaagatcagttgggtgcacgagtgggttacatcgaactggatctcaacagcggtaagatccttgagagttttcgccccgaagaacgttttccaatgatgagcacttttaaagttctgctatgtggcgcggtattatcccgtattgacgccgggcaagagcaactcggtcgccgcatacactattctcagaatgacttggttgagtactcaccagtcacagaaaagcatcttacggatggcatgacagtaagagaattatgcagtgctgccataaccatgagtgataacactgcggccaacttacttctgacaacgatcggaggaccgaaggagctaaccgcttttttgcacaacatgggggatcatgtaactcgccttgatcgttgggaaccggagctgaatgaagccataccaaacgacgagcgtgacaccacgatgcctgtagcaatggcaacaacgttgcgcaaactattaactggcgaactacttactctagcttcccggcaacaattaatagactggatggaggcggataaagttgcaggaccacttctgcgctcggcccttccggctggctggtttattgctgataaatctggagccggtgagcgtgggtctcgcggtatcattgcagcactggggccagatggtaagccctcccgtatcgtagttatctacacgacggggagtcaggcaactatggatgaacgaaatagacagatcgctgagataggtgcctcactgattaagcattggtaactgtcagaccaagtttactcatatatactttagattgatttaaaacttcatttttaatttaaaaggatctaggtgaagatcctttttgataatctcatgaccaaaatccc

SEQ ID NO: 186 - DNA, 11127 bp, synthetic construct
  misc_feature 1..11127: note = V68 DNA
  source 1..11127: mol_type = other DNA
tccagccaccatgaaccatgaccaggaatttgaccccccaaaggtttacccacctgtgccagctgagaagaggaagcccatccgcgtgctgtctctctttgatgggattgctacagggctcctggtgctgaaggacctgggcatccaagtggaccgctacattgcctccgaggtgtgtgaggactccatcacggtgggcatggtgcggcaccagggaaagatcatgtacgtcggggacgtccgcagcgtcacacagaagcatatccaggagtggggcccattcgacctggtgattggaggcagtccctgcaatgacctctccattgtcaaccctgcccgcaagggactttatgagggtactggccgcctcttctttgagttctaccgcctcctgcatgatgcgcggcccaaggagggagatgatcgccccttcttctggctctttgagaatgtggtggccatgggcgttagtgacaagagggacatctcgcgatttcttgagtctaaccccgtgatgattgacgccaaagaagtgtctgctgcacacagggcccgttacttctggggtaaccttcctggcatgaacaggcctttggcatccactgtgaatgataagctggagctgcaagagtgtctggagcacggcagaatagccaagttcagcaaagtgaggaccattaccaccaggtcaaactctataaagcagggcaaagaccagcatttccccgtcttcatgaacgagaaggaggacatcctgtggtgcactgaaatggaaagggtgtttggcttccccgtccactacacagacgtctccaacatgagccgcttggcgaggcagagactgctgggccgatcgtggagcgtgccggtcatccgccacctcttcgctccgctgaaggaatattttgcttgtgtgtctagcggcaatagtaacgctaacagccgcgggccgagcttcagcagcggcctggtgccgttaagcttgcgcggcagccatatgggccctatggagatatacaagacagtgtctgcatggaagagacagccagtgcgggtactgagcctcttcagaaacatcgacaaggtactaaagagtttgggcttcttggaaagcggttctggttctgggggaggaacgctgaagtacgtggaagatgtcacaaatgtcgtgaggagagacgtggagaaatggggcccctttgacctggtgtacggctcgacgcagcccctaggcagctcttgtgatcgctgtcccggctggtacatgttccagttccaccggatcctgcagtatgcgctgcctcgccaggagagtcagcggcccttcttctggatattcatggacaatctgctgctgactgaggatgaccaagagacaactacccgcttccttcagacagaggctgtgaccctccaggatgtccgtggcagagactaccagaatgctatgcgggtgtggagcaacattccagggctgaagagcaagcatgcgcccctgaccccaaaggaagaagagtatctgcaagcccaagtcagaagcaggagcaagctggacgccccgaaagttgacctcctggtgaagaactgccttctcccgctgagagagtacttcaagtatttttctcaaaactcacttcctcttggagggccgagctctggcgcacccccaccaagtggagggtctcctgccgggtccccaacatctactgaagaaggcaccagcgaatccgcaacgcccgagtcaggccctggtacctccacagaaccatctgaaggtagtgcgcctggttccccagctggaagccctacttccaccgaagaaggcacgtcaaccgaaccaagtgaaggatctgcccctgggaccagcactgaaccatctgagccaaaaaagaagagaaaggtaatggacaagaagtacagcatcggcctggccatcggcaccaactctgtgggctgggccgtgatcaccgacgagtacaaggtgcccagcaagaaattcaaggtgctgggcaacaccgaccggcacagcatcaagaagaacctgatcggcgccctgctgttcgacagcggagaaacagccgaggccacccggctgaagagaaccgccagaagaagatacaccagacggaagaaccggatctgctatctgcaagagatcttcagcaacgagatggccaaggtggacgacagcttcttccacagactggaagagtccttcctggtggaagaggataagaagcacgagcggcaccccatcttcggcaacatcgtggacgaggtggcctaccacgagaagtaccccaccatctaccacctgagaaagaaactggtggacagcaccgacaaggccgacctgcggctgatctatctggccctggcccacatgatcaagttccggggccacttcctgatcgagggcgacctgaaccccgacaacagcgacgtggacaagctgttcatccagctggtgcagacctacaaccagctgttcgaggaaaaccccatcaacgccagcggcgtggacgccaaggccatcctgtctgccagactgagcaagagcagacggctggaaaatctgatcgcccagctgcccggcgagaagaagaatggcctgttcggcaacctgattgccctgagcctgggcctgacccccaacttcaagagcaacttcgacctggccgaggatgccaaactgcagctgagcaaggacacctacgacgacgacctggacaacctgctggcccagatcggcgaccagtacgccgacctgtttctggccgccaagaacctgtccgacgccatcctgctgagcgacatcctgagagtgaacaccgagatcaccaaggcccccctgagcgcctctatgatcaagagatacgacgagcaccaccaggacctgaccctgctgaaagctctcgtgcggcagcagctgcctgagaagtacaaagagattttcttcgaccagagcaagaacggctacgccggctacatcgatggcggagccagccaggaagagttctacaagttcatcaagcccatcctggaaaagatggacggcaccgaggaactgctcgtgaagctgaacagagaggacctgctgcggaagcagcggaccttcgacaacggcagcatcccccaccagatccacctgggagagctgcacgccattctgcggcggcaggaagatttttacccattcctgaaggacaaccgggaaaagatcgagaagatcctgaccttccgcatcccctactacgtgggccctctggccaggggaaacagcagattcgcctggatgaccagaaagagcgaggaaaccatcaccccctggaacttcgaggaagtggtggacaagggcgccagcgcccagagcttcatcgagcggatgaccaacttcgataagaacctgcccaacgagaaggtgctgcccaagcacagcctgctgtacgagtacttcaccgtgtacaacgagctgaccaaagtgaaatacgtgaccgagggaatgagaaagcccgccttcctgagcggcgagcagaaaaaagccatcgtggacctgctgttcaagaccaaccggaaagtgaccgtgaagcagctgaaagaggactacttcaagaaaatcgagtgcttcgactccgtggaaatctccggcgtggaagatcggttcaacgcctccctgggcacataccacgatctgctgaaaattatcaaggacaaggacttcctggacaatgaggaaaacgaggacattctggaagatatcgtgctgaccctgacactgtttgaggacagagagatgatcgaggaacggctgaaaacctatgcccacctgttcgacgacaaagtgatgaagcagctgaagcggcggagatacaccggctggggcaggctgagccggaagctgatcaacggcatccgggacaagcagtccggcaagacaatcctggatttcctgaagtccgacggcttcgccaacagaaacttcatgcagctgatccacgacgacagcctgacctttaaagaggacatccagaaagcccaggtgtccggccagggcgatagcctgcacgagcacattgccaatctggccggcagccccgccattaagaagggcatcctgcagacagtgaaggtggtggacgagctcgtgaaagtgatgggccggcacaagcccgagaacatcgtgatcgaaatggccagagagaaccagaccacccagaagggacagaagaacagccgcgagagaatgaagcggatcgaagagggcatcaaagagctgggcagccagatcctgaaagaacaccccgtggaaaacacccagctgcagaacgagaagctgtacctgtactacctgcagaatgggcgggatatgtacgtggaccaggaactggacatcaaccggctgtccgactacgatgtggacgctatcgtgcctcagagctttctgaaggacgactccatcgataacaaagtgctgactcggagcgacaagaaccggggcaagagcgacaacgtgccctccgaagaggtcgtgaagaagatgaagaactactggcgccagctgctgaatgccaagctgattacccagaggaagttcgacaatctgaccaaggccgagagaggcggcctgagcgaactggataaggccggcttcatcaagagacagctggtggaaacccggcagatcacaaagcacgtggcacagatcctggactcccggatgaacactaagtacgacgagaacgacaaactgatccgggaagtgaaagtgatcaccctgaagtccaagctggtgtccgatttccggaaggatttccagttttacaaagtgcgcgagatcaacaactaccaccacgcccacgacgcctacctgaacgccgtcgtgggaaccgccctgatcaaaaagtaccctaagctggaaagcgagttcgtgtacggcgactacaaggtgtacgacgtgcggaagatgatcgccaagagcgagcaggaaatcggcaaggctaccgccaagtacttcttctacagcaacatcatgaactttttcaagaccgagattaccctggccaacggcgagatccggaagcggcctctgatcgagacaaacggcgaaacaggcgagatcgtgtgggataagggccgggactttgccaccgtgcggaaagtgctgtctatgccccaagtgaatatcgtgaaaaagaccgaggtgcagacaggcggcttcagcaaagagtctatcctgcccaagaggaacagcgacaagctgatcgccagaaagaaggactgggaccctaagaagtacggcggcttcgacagccccaccgtggcctattctgtgctggtggtggccaaagtggaaaagggcaagtccaagaaactgaagagtgtgaaagagctgctggggatcaccatcatggaaagaagcagcttcgagaagaatcccatcgactttctggaagccaagggctacaaagaagtgaaaaaggacctgatcatcaagctgcctaagtactccctgttcgagctggaaaacggccggaagagaatgctggcctctgccggcgaactgcagaagggaaacgaactggccctgccctccaaatatgtgaacttcctgtacctggccagccactatgagaagctgaagggctcccccgaggataatgagcagaaacagctgtttgtggaacagcacaaacactacctggacgagatcatcgagcagatcagcgagttctccaagagagtgatcctggccgacgctaatctggacaaggtgctgagcgcctacaacaagcacagagacaagcctatcagagagcaggccgagaatatcatccacctgtttaccctgaccaatctgggagcccctgccgccttcaagtactttgacaccaccatcgaccggaagaggtacaccagcaccaaagaggtgctggacgccaccctgatccaccagagcatcaccggcctgtacgagacacggatcgacctgtctcagctgggaggcgacgcctatccctatgacgtgcccgattatgccagcctgggcagcggctcccccaagaaaaaacgcaaggtggaagatcctaagaaaaagcggaaagtggacggcagcggcagcgagacccccggtaccagcgagagcgccacccccgagagccggacactcgagatggcgcagacgcagggcacccggaggaaagtctgttactactacgacggggatgttggaaattactattatggacaaggccacccaatgaagcctcaccgaatccgcatgactcataatttgctgctcaactatggtctctaccgaaaaatggaaatctatcgccctcacaaagccaatgctgaggagatgaccaagtaccacagcgatgactacattaaattcttgcgctccatccgtccagataacatgtcggagtacagcaagcagatgcagagattcaacgttggtgaggactgtccagtattcgatggcctgtttgagttctgtcagttgtctactggtggttctgtggcaagtgctgtgaaacttaataagcagcagacggacatcgctgtgaattgggctgggggcctgcaccatgcaaagaagtccgaggcatctggcttctgttacgtcaatgatatcgtcttggccatcctggaactgctaaagtatcaccagagggtgctgtacattgacattgatattcaccatggtgacggcgtggaagaggccttctacaccacggaccgggtcatgactgtgtcctttcataagtatggagagtacttcccaggaactggggacctacgggatatcggggctggcaaaggcaagtattatgctgttaactacccgctccgagacgggattgatgacgagtcctatgaggccattttcaagccggtcatgtccaaagtaatggagatgttccagcctagtgcggtggtcttacagtgtggctcagactccctatctggggatcggttaggttgcttcaatctaactatcaaaggacacgccaagtgtgtggaatttgtcaagagctttaacctgcctatgctgatgctgggaggcggtggttacaccattcgtaacgttgcccggtgctggacatatgagacagctgtggccctggatacggagatccctaatgagcttccatacaatgactactttgaatactttggaccagatttcaagctccacatcagtccttccaatatgactaaccagaacacgaatgagtacctggagaagatcaaacagcgactgtttgagaaccttagaatgctgccgcacgcacctggggtccaaatgcaggcgattcctgaggacgccatccctgaggagagtggcgatgaggacgaagacgaccctgacaagcgcatctcgatctgctcctctgacaaacgaattgcctgtgaggaagagttctccgattctgaagaggagggagaggggggccgcaagaactcttccaacttcaaaaaagccaagagagtcaaaacagaggatgaaaaagagaaagacccagaggagaagaaagaagtcaccgaagaggagaaaaccaaggaggagaagccagaagccaaaggggtcaaggaggaggtcaagttggcctgagatcccaagcacgcagcaatgcagctcaaaacgcttagcctagccacacccccacgggaaacagcagtgattaacctttagcaataaacgaaagtttaactaagctatactaaccccagggttggtcaatttcgtgccagccacaccctggtactgcatgcacgcaatgctagctgcccctttcccgtcctgggcaccccgagtctcccccgaccccgggtcccaggtatgctcccacctccacctgccccactcaccacctctgctagttccagacacctccgagacgaggaaaaaaaaaaaaaaaaaaaaaaaaaaaaaaaaaaaaaaaaaaaaaaaaaaaaaaaaaaaaaaaaaaaaaaaaaaaaaaaaaaaaaaaaaaaaaaaaaaaaaaaaaaaaaaaaaaaaaaaaaaaaaaaaaaaaaaaaaaaaaaaaaaaaaaaaaaaaaaaaaaaaaaaaaaaaaaaaaaaaaaaaaaaaaaaaaaaaaaaaaaaaaaaaaaaaaaaaaaaaaaaaaaaaaaaaaaaaaaaaaaaaaaaaaaaaaaaaaaaaaaaaaaaaaaaaaaaaaaaaaaaaaaaaaaaaaaaaaaaaaaaaaaaaaaaaaaaaaaaaaaaaaaaaaaaaaaaaaaaaaaaaaaaaaaaaaaaaaaaaaaaaaaaaaaaaaaaaaaaaaaaaaaaaaaaaaaccgtcttcaagctttctagaaattcactggccgtcgttttacaacgtcgtgactgggaaaaccctggcgttacccaacttaatcgccttgcagcacatccccctttcgccagctggcgtaatagcgaagaggcccgcaccgatcgcccttcccaacagttgcgcagcctgaatggcgaatggcgcctgatgcggtattttctccttacgcatctgtgcggtatttcacaccgcatatggtgcactctcagtacaatctgctctgatgccgcatagttaagccagccccgacacccgccaacacccgctgacgcgccctgacgggcttgtctgctcccggcatccgcttacagacaagctgtgaccgtctccgggagctgcatgtgtcagaggttttcaccgtcatcaccgaaacgcgcgagacgaaagggcctcgtgatacgcctatttttataggttaatgtcatgataataatggtttcttagacgtcaggtggcacttttcggggaaatgtgcgcggaacccctatttgtttatttttctaaatacattcaaatatgtatccgctcatgagacaataaccctgataaatgcttcaataatattgaaaaaggaagagtatgagtattcaacatttccgtgtcgcccttattcccttttttgcggcattttgccttcctgtttttgctcacccagaaacgctggtgaaagtaaaagatgctgaagatcagttgggtgcacgagtgggttacatcgaactggatctcaacagcggtaagatccttgagagttttcgccccgaagaacgttttccaatgatgagcacttttaaagttctgctatgtggcgcggtattatcccgtattgacgccgggcaagagcaactcggtcgccgcatacactattctcagaatgacttggttgagtactcaccagtcacagaaaagcatcttacggatggcatgacagtaagagaattatgcagtgctgccataaccatgagtgataacactgcggccaacttacttctgacaacgatcggaggaccgaaggagctaaccgcttttttgcacaacatgggggatcatgtaactcgccttgatcgttgggaaccggagctgaatgaagccataccaaacgacgagcgtgacaccacgatgcctgtagcaatggcaacaacgttgcgcaaactattaactggcgaactacttactctagcttcccggcaacaattaatagactggatggaggcggataaagttgcaggaccacttctgcgctcggcccttccggctggctggtttattgctgataaatctggagccggtgagcgtgggtctcgcggtatcattgcagcactggggccagatggtaagccctcccgtatcgtagttatctacacgacggggagtcaggcaactatggatgaacgaaatagacagatcgctgagataggtgcctcactgattaagcattggtaactgtcagaccaagtttactcatatatactttagattgatttaaaacttcatttttaatttaaaaggatctaggtgaagatcctttttgataatctcatgaccaaaatcccttaacgtgagttttcgttccactgagcgtcagaccccgtagaaaagatcaaaggatcttcttgagatcctttttttctgcgcgtaatctgctgcttgcaaacaaaaaaaccaccgctaccagcggtggtttgtttgccggatcaagagctaccaactctttttccgaaggtaactggcttcagcagagcgcagataccaaatactgttcttctagtgtagccgtagttaggccaccacttcaagaactctgtagcaccgcctacatacctcgctctgctaatcctgttaccagtggctgctgccagtggcgataagtcgtgtcttaccgggttggactcaagacgatagttaccggataaggcgcagcggtcgggctgaacggggggttcgtgcacacagcccagcttggagcgaacgacctacaccgaactgagatacctacagcgtgagctatgagaaagcgccacgcttcccgaagggagaaaggcggacaggtatccggtaagcggcagggtcggaacaggagagcgcacgagggagcttccagggggaaacgcctggtatctttatagtcctgtcgggtttcgccacctctgacttgagcgtcgatttttgtgatgctcgtcaggggggcggagcctatggaaaaacgccagcaacgcggcctttttacggttcctggccttttgctggccttttgctcacatgttctttcctgcgttatcccctgattctgtggataaccgtattaccgcctttgagtgagctgataccgctcgccgcagccgaacgaccgagcgcagcgagtcagtgagcgaggaagcggaagagcgcccaatacgcaaaccgcctctccccgcgcgttggccgattcattaatgcagctggcacgacaggtttcccgactggaaagcgggcagtgagcgcaacgcaattaatgtgagttagctcactcattaggcaccccaggctttacactttatgcttccggctcgtatgttgtgtggaattgtgagcggataacaatttcacacaggaaacagctatgaccatgattacgcctctagaaagctttaatacgactcactataaggactcactatttgttttcgcgcccagttgcaaaaagtgtcgacatttgcttctgacacaactgtgttcactagcaacctcaaacagacaccgccaccatgcctgctgctaagagagtgaaactggatggatccaccgg

SEQ ID NO: 187 - DNA, 10794 bp, synthetic construct
  misc_feature 1..10794: note = V69 DNA
  source 1..10794: mol_type = other DNA
tccagccaccatgaaccatgaccaggaatttgaccccccaaaggtttacccacctgtgccagctgagaagaggaagcccatccgcgtgctgtctctctttgatgggattgctacagggctcctggtgctgaaggacctgggcatccaagtggaccgctacattgcctccgaggtgtgtgaggactccatcacggtgggcatggtgcggcaccagggaaagatcatgtacgtcggggacgtccgcagcgtcacacagaagcatatccaggagtggggcccattcgacctggtgattggaggcagtccctgcaatgacctctccattgtcaaccctgcccgcaagggactttatgagggtactggccgcctcttctttgagttctaccgcctcctgcatgatgcgcggcccaaggagggagatgatcgccccttcttctggctctttgagaatgtggtggccatgggcgttagtgacaagagggacatctcgcgatttcttgagtctaaccccgtgatgattgacgccaaagaagtgtctgctgcacacagggcccgttacttctggggtaaccttcctggcatgaacaggcctttggcatccactgtgaatgataagctggagctgcaagagtgtctggagcacggcagaatagccaagttcagcaaagtgaggaccattaccaccaggtcaaactctataaagcagggcaaagaccagcatttccccgtcttcatgaacgagaaggaggacatcctgtggtgcactgaaatggaaagggtgtttggcttccccgtccactacacagacgtctccaacatgagccgcttggcgaggcagagactgctgggccgatcgtggagcgtgccggtcatccgccacctcttcgctccgctgaaggaatattttgcttgtgtgtctagcggcaatagtaacgctaacagccgcgggccgagcttcagcagcggcctggtgccgttaagcttgcgcggcagccatatgggccctatggagatatacaagacagtgtctgcatggaagagacagccagtgcgggtactgagcctcttcagaaacatcgacaaggtactaaagagtttgggcttcttggaaagcggttctggttctgggggaggaacgctgaagtacgtggaagatgtcacaaatgtcgtgaggagagacgtggagaaatggggcccctttgacctggtgtacggctcgacgcagcccctaggcagctcttgtgatcgctgtcccggctggtacatgttccagttccaccggatcctgcagtatgcgctgcctcgccaggagagtcagcggcccttcttctggatattcatggacaatctgctgctgactgaggatgaccaagagacaactacccgcttccttcagacagaggctgtgaccctccaggatgtccgtggcagagactaccagaatgctatgcgggtgtggagcaacattccagggctgaagagcaagcatgcgcccctgaccccaaaggaagaagagtatctgcaagcccaagtcagaagcaggagcaagctggacgccccgaaagttgacctcctggtgaagaactgccttctcccgctgagagagtacttcaagtatttttctcaaaactcacttcctcttggagggccgagctctggcgcacccccaccaagtggagggtctcctgccgggtccccaacatctactgaagaaggcaccagcgaatccgcaacgcccgagtcaggccctggtacctccacagaaccatctgaaggtagtgcgcctggttccccagctggaagccctacttccaccgaagaaggcacgtcaaccgaaccaagtgaaggatctgcccctgggaccagcactgaaccatctgagccaaaaaagaagagaaaggtaatggacaagaagtacagcatcggcctggccatcggcaccaactctgtgggctgggccgtgatcaccgacgagtacaaggtgcccagcaagaaattcaaggtgctgggcaacaccgaccggcacagcatcaagaagaacctgatcggcgccctgctgttcgacagcggagaaacagccgaggccacccggctgaagagaaccgccagaagaagatacaccagacggaagaaccggatctgctatctgcaagagatcttcagcaacgagatggccaaggtggacgacagcttcttccacagactggaagagtccttcctggtggaagaggataagaagcacgagcggcaccccatcttcggcaacatcgtggacgaggtggcctaccacgagaagtaccccaccatctaccacctgagaaagaaactggtggacagcaccgacaaggccgacctgcggctgatctatctggccctggcccacatgatcaagttccggggccacttcctgatcgagggcgacctgaaccccgacaacagcgacgtggacaagctgttcatccagctggtgcagacctacaaccagctgttcgaggaaaaccccatcaacgccagcggcgtggacgccaaggccatcctgtctgccagactgagcaagagcagacggctggaaaatctgatcgcccagctgcccggcgagaagaagaatggcctgttcggcaacctgattgccctgagcctgggcctgacccccaacttcaagagcaacttcgacctggccgaggatgccaaactgcagctgagcaaggacacctacgacgacgacctggacaacctgctggcccagatcggcgaccagtacgccgacctgtttctggccgccaagaacctgtccgacgccatcctgctgagcgacatcctgagagtgaacaccgagatcaccaaggcccccctgagcgcctctatgatcaagagatacgacgagcaccaccaggacctgaccctgctgaaagctctcgtgcggcagcagctgcctgagaagtacaaagagattttcttcgaccagagcaagaacggctacgccggctacatcgatggcggagccagccaggaagagttctacaagttcatcaagcccatcctggaaaagatggacggcaccgaggaactgctcgtgaagctgaacagagaggacctgctgcggaagcagcggaccttcgacaacggcagcatcccccaccagatccacctgggagagctgcacgccattctgcggcggcaggaagatttttacccattcctgaaggacaaccgggaaaagatcgagaagatcctgaccttccgcatcccctactacgtgggccctctggccaggggaaacagcagattcgcctggatgaccagaaagagcgaggaaaccatcaccccctggaacttcgaggaagtggtggacaagggcgccagcgcccagagcttcatcgagcggatgaccaacttcgataagaacctgcccaacgagaaggtgctgcccaagcacagcctgctgtacgagtacttcaccgtgtacaacgagctgaccaaagtgaaatacgtgaccgagggaatgagaaagcccgccttcctgagcggcgagcagaaaaaagccatcgtggacctgctgttcaagaccaaccggaaagtgaccgtgaagcagctgaaagaggactacttcaagaaaatcgagtgcttcgactccgtggaaatctccggcgtggaagatcggttcaacgcctccctgggcacataccacgatctgctgaaaattatcaaggacaaggacttcctggacaatgaggaaaacgaggacattctggaagatatcgtgctgaccctgacactgtttgaggacagagagatgatcgaggaacggctgaaaacctatgcccacctgttcgacgacaaagtgatgaagcagctgaagcggcggagatacaccggctggggcaggctgagccggaagctgatcaacggcatccgggacaagcagtccggcaagacaatcctggatttcctgaagtccgacggcttcgccaacagaaacttcatgcagctgatccacgacgacagcctgacctttaaagaggacatccagaaagcccaggtgtccggccagggcgatagcctgcacgagcacattgccaatctggccggcagccccgccattaagaagggcatcctgcagacagtgaaggtggtggacgagctcgtgaaagtgatgggccggcacaagcccgagaacatcgtgatcgaaatggccagagagaaccagaccacccagaagggacagaagaacagccgcgagagaatgaagcggatcgaagagggcatcaaagagctgggcagccagatcctgaaagaacaccccgtggaaaacacccagctgcagaacgagaagctgtacctgtactacctgcagaatgggcgggatatgtacgtggaccaggaactggacatcaaccggctgtccgactacgatgtggacgctatcgtgcctcagagctttctgaaggacgactccatcgataacaaagtgctgactcggagcgacaagaaccggggcaagagcgacaacgtgccctccgaagaggtcgtgaagaagatgaagaactactggcgccagctgctgaatgccaagctgattacccagaggaagttcgacaatctgaccaaggccgagagaggcggcctgagcgaactggataaggccggcttcatcaagagacagctggtggaaacccggcagatcacaaagcacgtggcacagatcctggactcccggatgaacactaagtacgacgagaacgacaaactgatccgggaagtgaaagtgatcaccctgaagtccaagctggtgtccgatttccggaaggatttccagttttacaaagtgcgcgagatcaacaactaccaccacgcccacgacgcctacctgaacgccgtcgtgggaaccgccctgatcaaaaagtaccctaagctggaaagcgagttcgtgtacggcgactacaaggtgtacgacgtgcggaagatgatcgccaagagcgagcaggaaatcggcaaggctaccgccaagtacttcttctacagcaacatcatgaactttttcaagaccgagattaccctggccaacggcgagatccggaagcggcctctgatcgagacaaacggcgaaacaggcgagatcgtgtgggataagggccgggactttgccaccgtgcggaaagtgctgtctatgccccaagtgaatatcgtgaaaaagaccgaggtgcagacaggcggcttcagcaaagagtctatcctgcccaagaggaacagcgacaagctgatcgccagaaagaaggactgggaccctaagaagtacggcggcttcgacagccccaccgtggcctattctgtgctggtggtggccaaagtggaaaagggcaagtccaagaaactgaagagtgtgaaagagctgctggggatcaccatcatggaaagaagcagcttcgagaagaatcccatcgactttctggaagccaagggctacaaagaagtgaaaaaggacctgatcatcaagctgcctaagtactccctgttcgagctggaaaacggccggaagagaatgctggcctctgccggcgaactgcagaagggaaacgaactggccctgccctccaaatatgtgaacttcctgtacctggccagccactatgagaagctgaagggctcccccgaggataatgagcagaaacagctgtttgtggaacagcacaaacactacctggacgagatcatcgagcagatcagcgagttctccaagagagtgatcctggccgacgctaatctggacaaggtgctgagcgcctacaacaagcacagagacaagcctatcagagagcaggccgagaatatcatccacctgtttaccctgaccaatctgggagcccctgccgccttcaagtactttgacaccaccatcgaccggaagaggtacaccagcaccaaagaggtgctggacgccaccctgatccaccagagcatcaccggcctgtacgagacacggatcgacctgtctcagctgggaggcgacgcctatccctatgacgtgcccgattatgccagcctgggcagcggctcccccaagaaaaaacgcaaggtggaagatcctaagaaaaagcggaaagtggacggcagcggcagcgagacccccggtaccagcgagagcgccacccccgagagccggacactcgagatggcggcagccgaggccgcgaactgcatcatggagaattttgtagccaccttggctaatgggatgagcctccagccgcctcttgaagaagtgtcctgtggccaggcggaaagcagtgagaagcccaacgctgaggacatgacatccaaagattactactttgactcctacgcacactttggcatccacgaggagatgctgaaggacgaggtgcgcaccctcacttaccgcaactccatgtttcataaccggcacctcttcaaggacaaggtggtgctggacgtcggctcgggcaccggcatcctctgcatgtttgctgccaaggccggggcccgcaaggtcatcgggatcgagtgttccagtatctctgattatgcggtgaagatcgtcaaagccaacaagttagaccacgtggtgaccatcatcaaggggaaggtggaggaggtggagctcccagtggagaaggtggacatcatcatcagcgagtggatgggctactgcctcttctacgagtccatgctcaacaccgtgctctatgcccgggacaagtggctggcgcccgatggcctcatcttcccagaccgggccacgctgtatgtgacggccatcgaggaccggcagtacaaagactacaagatccactggtgggagaacgtgtatggcttcgacatgtcttgcatcaaagatgtggccattaaggagcccctagtggatgtcgtggaccccaaacagctggtcaccaacgcctgcctcataaaggaggtggacatctataccgtcaaggtggaagacctgaccttcacctccccgttctgcctgcaagtgaagcggaatgactacgtgcacgccctggtggcctacttcaacatcgagttcacacgctgccacaagaggaccggcttctccaccagccccgagtccccgtacacgcactggaagcagacggtgttctacatggaggactacctgaccgtgaagacgggcgaggagatcttcggcaccatcggcatgcggcccaacgccaagaacaaccgggacctggacttcaccatcgacctggacttcaagggccagctgtgcgagctgtcctgctccaccgactaccggatgcgctgagatcccaagcacgcagcaatgcagctcaaaacgcttagcctagccacacccccacgggaaacagcagtgattaacctttagcaataaacgaaagtttaactaagctatactaaccccagggttggtcaatttcgtgccagccacaccctggtactgcatgcacgcaatgctagctgcccctttcccgtcctgggcaccccgagtctcccccgaccccgggtcccaggtatgctcccacctccacctgccccactcaccacctctgctagttccagacacctccgagacgaggaaaaaaaaaaaaaaaaaaaaaaaaaaaaaaaaaaaaaaaaaaaaaaaaaaaaaaaaaaaaaaaaaaaaaaaaaaaaaaaaaaaaaaaaaaaaaaaaaaaaaaaaaaaaaaaaaaaaaaaaaaaaaaaaaaaaaaaaaaaaaaaaaaaaaaaaaaaaaaaaaaaaaaaaaaaaaaaaaaaaaaaaaaaaaaaaaaaaaaaaaaaaaaaaaaaaaaaaaaaaaaaaaaaaaaaaaaaaaaaaaaaaaaaaaaaaaaaaaaaaaaaaaaaaaaaaaaaaaaaaaaaaaaaaaaaaaaaaaaaaaaaaaaaaaaaaaaaaaaaaaaaaaaaaaaaaaaaaaaaaaaaaaaaaaaaaaaaaaaaaaaaaaaaaaaaaaaaaaaaaaaaaaaaaaaaaaaccgtcttcaagctttctagaaattcactggccgtcgttttacaacgtcgtgactgggaaaaccctggcgttacccaacttaatcgccttgcagcacatccccctttcgccagctggcgtaatagcgaagaggcccgcaccgatcgcccttcccaacagttgcgcagcctgaatggcgaatggcgcctgatgcggtattttctccttacgcatctgtgcggtatttcacaccgcatatggtgcactctcagtacaatctgctctgatgccgcatagttaagccagccccgacacccgccaacacccgctgacgcgccctgacgggcttgtctgctcccggcatccgcttacagacaagctgtgaccgtctccgggagctgcatgtgtcagaggttttcaccgtcatcaccgaaacgcgcgagacgaaagggcctcgtgatacgcctatttttataggttaatgtcatgataataatggtttcttagacgtcaggtggcacttttcggggaaatgtgcgcggaacccctatttgtttatttttctaaatacattcaaatatgtatccgctcatgagacaataaccctgataaatgcttcaataatattgaaaaaggaagagtatgagtattcaacatttccgtgtcgcccttattcccttttttgcggcattttgccttcctgtttttgctcacccagaaacgctggtgaaagtaaaagatgctgaagatcagttgggtgcacgagtgggttacatcgaactggatctcaacagcggtaagatccttgagagttttcgccccgaagaacgttttccaatgatgagcacttttaaagttctgctatgtggcgcggtattatcccgtattgacgccgggcaagagcaactcggtcgccgcatacactattctcagaatgacttggttgagtactcaccagtcacagaaaagcatcttacggatggcatgacagtaagagaattatgcagtgctgccataaccatgagtgataacactgcggccaacttacttctgacaacgatcggaggaccgaaggagctaaccgcttttttgcacaacatgggggatcatgtaactcgccttgatcgttgggaaccggagctgaatgaagccataccaaacgacgagcgtgacaccacgatgcctgtagcaatggcaacaacgttgcgcaaactattaactggcgaactacttactctagcttcccggcaacaattaatagactggatggaggcggataaagttgcaggaccacttctgcgctcggcccttccggctggctggtttattgctgataaatctggagccggtgagcgtgggtctcgcggtatcattgcagcactggggccagatggtaagccctcccgtatcgtagttatctacacgacggggagtcaggcaactatggatgaacgaaatagacagatcgctgagataggtgcctcactgattaagcattggtaactgtcagaccaagtttactcatatatactttagattgatttaaaacttcatttttaatttaaaaggatctaggtgaagatcctttttgataatctcatgaccaaaatcccttaacgtgagttttcgttccactgagcgtcagaccccgtagaaaagatcaaaggatcttcttgagatcctttttttctgcgcgtaatctgctgcttgcaaacaaaaaaaccaccgctaccagcggtggtttgtttgccggatcaagagctaccaactctttttccgaaggtaactggcttcagcagagcgcagataccaaatactgttcttctagtgtagccgtagttaggccaccacttcaagaactctgtagcaccgcctacatacctcgctctgctaatcctgttaccagtggctgctgccagtggcgataagtcgtgtcttaccgggttggactcaagacgatagttaccggataaggcgcagcggtcgggctgaacggggggttcgtgcacacagcccagcttggagcgaacgacctacaccgaactgagatacctacagcgtgagctatgagaaagcgccacgcttcccgaagggagaaaggcggacaggtatccggtaagcggcagggtcggaacaggagagcgcacgagggagcttccagggggaaacgcctggtatctttatagtcctgtcgggtttcgccacctctgacttgagcgtcgatttttgtgatgctcgtcaggggggcggagcctatggaaaaacgccagcaacgcggcctttttacggttcctggccttttgctggccttttgctcacatgttctttcctgcgttatcccctgattctgtggataaccgtattaccgcctttgagtgagctgataccgctcgccgcagccgaacgaccgagcgcagcgagtcagtgagcgaggaagcggaagagcgcccaatacgcaaaccgcctctccccgcgcgttggccgattcattaatgcagctggcacgacaggtttcccgactggaaagcgggcagtgagcgcaacgcaattaatgtgagttagctcactcattaggcaccccaggctttacactttatgcttccggctcgtatgttgtgtggaattgtgagcggataacaatttcacacaggaaacagctatgaccatgattacgcctctagaaagctttaatacgactcactataaggactcactatttgttttcgcgcccagttgcaaaaagtgtcgacatttgcttctgacacaactgtgttcactagcaacctcaaacagacaccgccaccatgcctgctgctaagagagtgaaactggatggatccaccgg

SEQ ID NO: 188 - DNA, 11457 bp, synthetic construct
  misc_feature 1..11457: note = V70 DNA
  source 1..11457: mol_type = other DNA
tccagccaccatgaaccatgaccaggaatttgaccccccaaaggtttacccacctgtgccagctgagaagaggaagcccatccgcgtgctgtctctctttgatgggattgctacagggctcctggtgctgaaggacctgggcatccaagtggaccgctacattgcctccgaggtgtgtgaggactccatcacggtgggcatggtgcggcaccagggaaagatcatgtacgtcggggacgtccgcagcgtcacacagaagcatatccaggagtggggcccattcgacctggtgattggaggcagtccctgcaatgacctctccattgtcaaccctgcccgcaagggactttatgagggtactggccgcctcttctttgagttctaccgcctcctgcatgatgcgcggcccaaggagggagatgatcgccccttcttctggctctttgagaatgtggtggccatgggcgttagtgacaagagggacatctcgcgatttcttgagtctaaccccgtgatgattgacgccaaagaagtgtctgctgcacacagggcccgttacttctggggtaaccttcctggcatgaacaggcctttggcatccactgtgaatgataagctggagctgcaagagtgtctggagcacggcagaatagccaagttcagcaaagtgaggaccattaccaccaggtcaaactctataaagcagggcaaagaccagcatttccccgtcttcatgaacgagaaggaggacatcctgtggtgcactgaaatggaaagggtgtttggcttccccgtccactacacagacgtctccaacatgagccgcttggcgaggcagagactgctgggccgatcgtggagcgtgccggtcatccgccacctcttcgctccgctgaaggaatattttgcttgtgtgtctagcggcaatagtaacgctaacagccgcgggccgagcttcagcagcggcctggtgccgttaagcttgcgcggcagccatatgggccctatggagatatacaagacagtgtctgcatggaagagacagccagtgcgggtactgagcctcttcagaaacatcgacaaggtactaaagagtttgggcttcttggaaagcggttctggttctgggggaggaacgctgaagtacgtggaagatgtcacaaatgtcgtgaggagagacgtggagaaatggggcccctttgacctggtgtacggctcgacgcagcccctaggcagctcttgtgatcgctgtcccggctggtacatgttccagttccaccggatcctgcagtatgcgctgcctcgccaggagagtcagcggcccttcttctggatattcatggacaatctgctgctgactgaggatgaccaagagacaactacccgcttccttcagacagaggctgtgaccctccaggatgtccgtggcagagactaccagaatgctatgcgggtgtggagcaacattccagggctgaagagcaagcatgcgcccctgaccccaaaggaagaagagtatctgcaagcccaagtcagaagcaggagcaagctggacgccccgaaagttgacctcctggtgaagaactgccttctcccgctgagagagtacttcaagtatttttctcaaaactcacttcctcttggagggccgagctctggcgcacccccaccaagtggagggtctcctgccgggtccccaacatctactgaagaaggcaccagcgaatccgcaacgcccgagtcaggccctggtacctccacagaaccatctgaaggtagtgcgcctggttccccagctggaagccctacttccaccgaagaaggcacgtcaaccgaaccaagtgaaggatctgcccctgggaccagcactgaaccatctgagccaaaaaagaagagaaaggtaatggacaagaagtacagcatcggcctggccatcggcaccaactctgtgggctgggccgtgatcaccgacgagtacaaggtgcccagcaagaaattcaaggtgctgggcaacaccgaccggcacagcatcaagaagaacctgatcggcgccctgctgttcgacagcggagaaacagccgaggccacccggctgaagagaaccgccagaagaagatacaccagacggaagaaccggatctgctatctgcaagagatcttcagcaacgagatggccaaggtggacgacagcttcttccacagactggaagagtccttcctggtggaagaggataagaagcacgagcggcaccccatcttcggcaacatcgtggacgaggtggcctaccacgagaagtaccccaccatctaccacctgagaaagaaactggtggacagcaccgacaaggccgacctgcggctgatctatctggccctggcccacatgatcaagttccggggccacttcctgatcgagggcgacctgaaccccgacaacagcgacgtggacaagctgttcatccagctggtgcagacctacaaccagctgttcgaggaaaaccccatcaacgccagcggcgtggacgccaaggccatcctgtctgccagactgagcaagagcagacggctggaaaatctgatcgcccagctgcccggcgagaagaagaatggcctgttcggcaacctgattgccctgagcctgggcctgacccccaacttcaagagcaacttcgacctggccgaggatgccaaactgcagctgagcaaggacacctacgacgacgacctggacaacctgctggcccagatcggcgaccagtacgccgacctgtttctggccgccaagaacctgtccgacgccatcctgctgagcgacatcctgagagtgaacaccgagatcaccaaggcccccctgagcgcctctatgatcaagagatacgacgagcaccaccaggacctgaccctgctgaaagctctcgtgcggcagcagctgcctgagaagtacaaagagattttcttcgaccagagcaagaacggctacgccggctacatcgatggcggagccagccaggaagagttctacaagttcatcaagcccatcctggaaaagatggacggcaccgaggaactgctcgtgaagctgaacagagaggacctgctgcggaagcagcggaccttcgacaacggcagcatcccccaccagatccacctgggagagctgcacgccattctgcggcggcaggaagatttttacccattcctgaaggacaaccgggaaaagatcgagaagatcctgaccttccgcatcccctactacgtgggccctctggccaggggaaacagcagattcgcctggatgaccagaaagagcgaggaaaccatcaccccctggaacttcgaggaagtggtggacaagggcgccagcgcccagagcttcatcgagcggatgaccaacttcgataagaacctgcccaacgagaaggtgctgcccaagcacagcctgctgtacgagtacttcaccgtgtacaacgagctgaccaaagtgaaatacgtgaccgagggaatgagaaagcccgccttcctgagcggcgagcagaaaaaagccatcgtggacctgctgttcaagaccaaccggaaagtgaccgtgaagcagctgaaagaggactacttcaagaaaatcgagtgcttcgactccgtggaaatctccggcgtggaagatcggttcaacgcctccctgggcacataccacgatctgctgaaaattatcaaggacaaggacttcctggacaatgaggaaaacgaggacattctggaagatatcgtgctgaccctgacactgtttgaggacagagagatgatcgaggaacggctgaaaacctatgcccacctgttcgacgacaaagtgatgaagcagctgaagcggcggagatacaccggctggggcaggctgagccggaagctgatcaacggcatccgggacaagcagtccggcaagacaatcctggatttcctgaagtccgacggcttcgccaacagaaacttcatgcagctgatccacgacgacagcctgacctttaaagaggacatccagaaagcccaggtgtccggccagggcgatagcctgcacgagcacattgccaatctggccggcagccccgccattaagaagggcatcctgcagacagtgaaggtggtggacgagctcgtgaaagtgatgggccggcacaagcccgagaacatcgtgatcgaaatggccagagagaaccagaccacccagaagggacagaagaacagccgcgagagaatgaagcggatcgaagagggcatcaaagagctgggcagccagatcctgaaagaacaccccgtggaaaacacccagctgcagaacgagaagctgtacctgtactacctgcagaatgggcgggatatgtacgtggaccaggaactggacatcaaccggctgtccgactacgatgtggacgctatcgtgcctcagagctttctgaaggacgactccatcgataacaaagtgctgactcggagcgacaagaaccggggcaagagcgacaacgtgccctccgaagaggtcgtgaagaagatgaagaactactggcgccagctgctgaatgccaagctgattacccagaggaagttcgacaatctgaccaaggccgagagaggcggcctgagcgaactggataaggccggcttcatcaagagacagctggtggaaacccggcagatcacaaagcacgtggcacagatcctggactcccggatgaacactaagtacgacgagaacgacaaactgatccgggaagtgaaagtgatcaccctgaagtccaagctggtgtccgatttccggaaggatttccagttttacaaagtgcgcgagatcaacaactaccaccacgcccacgacgcctacctgaacgccgtcgtgggaaccgccctgatcaaaaagtaccctaagctggaaagcgagttcgtgtacggcgactacaaggtgtacgacgtgcggaagatgatcgccaagagcgagcaggaaatcggcaaggctaccgccaagtacttcttctacagcaacatcatgaactttttcaagaccgagattaccctggccaacggcgagatccggaagcggcctctgatcgagacaaacggcgaaacaggcgagatcgtgtgggataagggccgggactttgccaccgtgcggaaagtgctgtctatgccccaagtgaatatcgtgaaaaagaccgaggtgcagacaggcggcttcagcaaagagtctatcctgcccaagaggaacagcgacaagctgatcgccagaaagaaggactgggaccctaagaagtacggcggcttcgacagccccaccgtggcctattctgtgctggtggtggccaaagtggaaaagggcaagtccaagaaactgaagagtgtgaaagagctgctggggatcaccatcatggaaagaagcagcttcgagaagaatcccatcgactttctggaagccaagggctacaaagaagtgaaaaaggacctgatcatcaagctgcctaagtactccctgttcgagctggaaaacggccggaagagaatgctggcctctgccggcgaactgcagaagggaaacgaactggccctgccctccaaatatgtgaacttcctgtacctggccagccactatgagaagctgaagggctcccccgaggataatgagcagaaacagctgtttgtggaacagcacaaacactacctggacgagatcatcgagcagatcagcgagttctccaagagagtgatcctggccgacgctaatctggacaaggtgctgagcgcctacaacaagcacagagacaagcctatcagagagcaggccgagaatatcatccacctgtttaccctgaccaatctgggagcccctgccgccttcaagtactttgacaccaccatcgaccggaagaggtacaccagcaccaaagaggtgctggacgccaccctgatccaccagagcatcaccggcctgtacgagacacggatcgacctgtctcagctgggaggcgacgcctatccctatgacgtgcccgattatgccagcctgggcagcggctcccccaagaaaaaacgcaaggtggaagatcctaagaaaaagcggaaagtggacggcagcggcagcgagacccccggtaccagcgagagcgccacccccgagagccggacactcgagacccctccaccccaggtggcctacagcaaggaacgtatcccgggcaagggtgttttcattaacacaggccctgaatttctggttggctgtgactgcaaggatgggtgtcgggacaagtccaagtgtgcctgccatcaactaactatccaggctacagcctgtaccccaggaggccaaatcaaccctaactctggctaccagtacaagagactagaagagtgtctacccacaggggtatatgagtgtaacaaacgctgcaaatgtgacccaaacatgtgcacaaaccggttggtgcaacatggactacaagttcggctacagctattcaagacacagaacaagggctggggtatccgctgcttggatgacattgccaaaggctcttttgtttgtatttatgcaggcaaaatcctgacagatgactttgcagacaaggagggtctggaaatgggtgatgagtactttgcaaatctggaccatatcgagagcgtggagaacttcaaagaaggatatgagagtgatgccccctgttcctctgacagcagtggtgtagacttgaaggaccaggaagatggcaacagcggtacagaggaccctgaagagtccaatgatgatagctcagatgataacttctgtaaggatgaggacttcagcaccagttcagtgtggcggagctatgctacccggaggcagacccggggccagaaagagaacggactctctgagacaacttccaaggactcccaccccccagatcttggacccccacatattcctgttcctccctcaatccctgtaggtggctgcaatccaccttcctccgaagagacacccaagaacaaggtggcctcatggttgagctgcaatagtgtcagtgaaggtggttttgctgactctgatagccattcatccttcaagactaatgaaggtggggagggccgggctgggggaagccgaatggaggctgagaaggcctccacctcaggactaggcatcaaggatgagggagacatcaaacaggccaagaaagaggacactgacgaccgaaacaagatgtcagtagttactgaaagctctcgaaattacggttacaatccttctcctgtgaagcctgaaggacttcgccgcccacctagtaagactagtatgcatcaaagccgaagactcatggcttctgctcagtccaaccctgatgatgtcctgacactgtccagcagcacagaaagtgagggggaaagtgggaccagccgaaagcccactgctggtcagacttcggctacagcggttgacagtgatgatatccagaccatatcctctggctctgaaggggatgactttgaggacaagaagaacatgactggtccaatgaagcgtcaagtggcagtaaaatcaacccgaggctttgctcttaaatcaacccatgggattgcaattaaatcaaccaacatggcctctgtggacaagggggagagcgcacctgttcgtaagaacacacgccaattctatgatggcgaggagtcttgctacatcattgatgccaagcttgaaggcaacctgggccgctacctcaaccacagttgcagccccaacctgtttgtccagaatgtcttcgtggatacccatgatcttcgcttcccctgggtggccttctttgccagcaaaagaatccgggctgggacagaacttacttgggactacaactacgaggtgggcagtgtggaaggcaaggagctactctgttgctgtggggccattgaatgcagaggacgtcttctttgagatcccaagcacgcagcaatgcagctcaaaacgcttagcctagccacacccccacgggaaacagcagtgattaacctttagcaataaacgaaagtttaactaagctatactaaccccagggttggtcaatttcgtgccagccacaccctggtactgcatgcacgcaatgctagctgcccctttcccgtcctgggcaccccgagtctcccccgaccccgggtcccaggtatgctcccacctccacctgccccactcaccacctctgctagttccagacacctccgagacgaggaaaaaaaaaaaaaaaaaaaaaaaaaaaaaaaaaaaaaaaaaaaaaaaaaaaaaaaaaaaaaaaaaaaaaaaaaaaaaaaaaaaaaaaaaaaaaaaaaaaaaaaaaaaaaaaaaaaaaaaaaaaaaaaaaaaaaaaaaaaaaaaaaaaaaaaaaaaaaaaaaaaaaaaaaaaaaaaaaaaaaaaaaaaaaaaaaaaaaaaaaaaaaaaaaaaaaaaaaaaaaaaaaaaaaaaaaaaaaaaaaaaaaaaaaaaaaaaaaaaaaaaaaaaaaaaaaaaaaaaaaaaaaaaaaaaaaaaaaaaaaaaaaaaaaaaaaaaaaaaaaaaaaaaaaaaaaaaaaaaaaaaaaaaaaaaaaaaaaaaaaaaaaaaaaaaaaaaaaaaaaaaaaaaaaaaaaaccgtcttcaagctttctagaaattcactggccgtcgttttacaacgtcgtgactgggaaaaccctggcgttacccaacttaatcgccttgcagcacatccccctttcgccagctggcgtaatagcgaagaggcccgcaccgatcgcccttcccaacagttgcgcagcctgaatggcgaatggcgcctgatgcggtattttctccttacgcatctgtgcggtatttcacaccgcatatggtgcactctcagtacaatctgctctgatgccgcatagttaagccagccccgacacccgccaacacccgctgacgcgccctgacgggcttgtctgctcccggcatccgcttacagacaagctgtgaccgtctccgggagctgcatgtgtcagaggttttcaccgtcatcaccgaaacgcgcgagacgaaagggcctcgtgatacgcctatttttataggttaatgtcatgataataatggtttcttagacgtcaggtggcacttttcggggaaatgtgcgcggaacccctatttgtttatttttctaaatacattcaaatatgtatccgctcatgagacaataaccctgataaatgcttcaataatattgaaaaaggaagagtatgagtattcaacatttccgtgtcgcccttattcccttttttgcggcattttgccttcctgtttttgctcacccagaaacgctggtgaaagtaaaagatgctgaagatcagttgggtgcacgagtgggttacatcgaactggatctcaacagcggtaagatccttgagagttttcgccccgaagaacgttttccaatgatgagcacttttaaagttctgctatgtggcgcggtattatcccgtattgacgccgggcaagagcaactcggtcgccgcatacactattctcagaatgacttggttgagtactcaccagtcacagaaaagcatcttacggatggcatgacagtaagagaattatgcagtgctgccataaccatgagtgataacactgcggccaacttacttctgacaacgatcggaggaccgaaggagctaaccgcttttttgcacaacatgggggatcatgtaactcgccttgatcgttgggaaccggagctgaatgaagccataccaaacgacgagcgtgacaccacgatgcctgtagcaatggcaacaacgttgcgcaaactattaactggcgaactacttactctagcttcccggcaacaattaatagactggatggaggcggataaagttgcaggaccacttctgcgctcggcccttccggctggctggtttattgctgataaatctggagccggtgagcgtgggtctcgcggtatcattgcagcactggggccagatggtaagccctcccgtatcgtagttatctacacgacggggagtcaggcaactatggatgaacgaaatagacagatcgctgagataggtgcctcactgattaagcattggtaactgtcagaccaagtttactcatatatactttagattgatttaaaacttcatttttaatttaaaaggatctaggtgaagatcctttttgataatctcatgaccaaaatcccttaacgtgagttttcgttccactgagcgtcagaccccgtagaaaagatcaaaggatcttcttgagatcctttttttctgcgcgtaatctgctgcttgcaaacaaaaaaaccaccgctaccagcggtggtttgtttgccggatcaagagctaccaactctttttccgaaggtaactggcttcagcagagcgcagataccaaatactgttcttctagtgtagccgtagttaggccaccacttcaagaactctgtagcaccgcctacatacctcgctctgctaatcctgttaccagtggctgctgccagtggcgataagtcgtgtcttaccgggttggactcaagacgatagttaccggataaggcgcagcggtcgggctgaacggggggttcgtgcacacagcccagcttggagcgaacgacctacaccgaactgagatacctacagcgtgagctatgagaaagcgccacgcttcccgaagggagaaaggcggacaggtatccggtaagcggcagggtcggaacaggagagcgcacgagggagcttccagggggaaacgcctggtatctttatagtcctgtcgggtttcgccacctctgacttgagcgtcgatttttgtgatgctcgtcaggggggcggagcctatggaaaaacgccagcaacgcggcctttttacggttcctggccttttgctggccttttgctcacatgttctttcctgcgttatcccctgattctgtggataaccgtattaccgcctttgagtgagctgataccgctcgccgcagccgaacgaccgagcgcagcgagtcagtgagcgaggaagcggaagagcgcccaatacgcaaaccgcctctccccgcgcgttggccgattcattaatgcagctggcacgacaggtttcccgactggaaagcgggcagtgagcgcaacgcaattaatgtgagttagctcactcattaggcaccccaggctttacactttatgcttccggctcgtatgttgtgtggaattgtgagcggataacaatttcacacaggaaacagctatgaccatgattacgcctctagaaagctttaatacgactcactataaggactcactatttgttttcgcgcccagttgcaaaaagtgtcgacatttgcttctgacacaactgtgttcactagcaacctcaaacagacaccgccaccatgcctgctgctaagagagtgaaactggatggatccaccgg

SEQ ID NO: 189 - DNA, 10584 bp, synthetic construct
  misc_feature 1..10584: note = V71 DNA
  source 1..10584: mol_type = other DNA
tccagccaccatgaaccatgaccaggaatttgaccccccaaaggtttacccacctgtgccagctgagaagaggaagcccatccgcgtgctgtctctctttgatgggattgctacagggctcctggtgctgaaggacctgggcatccaagtggaccgctacattgcctccgaggtgtgtgaggactccatcacggtgggcatggtgcggcaccagggaaagatcatgtacgtcggggacgtccgcagcgtcacacagaagcatatccaggagtggggcccattcgacctggtgattggaggcagtccctgcaatgacctctccattgtcaaccctgcccgcaagggactttatgagggtactggccgcctcttctttgagttctaccgcctcctgcatgatgcgcggcccaaggagggagatgatcgccccttcttctggctctttgagaatgtggtggccatgggcgttagtgacaagagggacatctcgcgatttcttgagtctaaccccgtgatgattgacgccaaagaagtgtctgctgcacacagggcccgttacttctggggtaaccttcctggcatgaacaggcctttggcatccactgtgaatgataagctggagctgcaagagtgtctggagcacggcagaatagccaagttcagcaaagtgaggaccattaccaccaggtcaaactctataaagcagggcaaagaccagcatttccccgtcttcatgaacgagaaggaggacatcctgtggtgcactgaaatggaaagggtgtttggcttccccgtccactacacagacgtctccaacatgagccgcttggcgaggcagagactgctgggccgatcgtggagcgtgccggtcatccgccacctcttcgctccgctgaaggaatattttgcttgtgtgtctagcggcaatagtaacgctaacagccgcgggccgagcttcagcagcggcctggtgccgttaagcttgcgcggcagccatatgggccctatggagatatacaagacagtgtctgcatggaagagacagccagtgcgggtactgagcctcttcagaaacatcgacaaggtactaaagagtttgggcttcttggaaagcggttctggttctgggggaggaacgctgaagtacgtggaagatgtcacaaatgtcgtgaggagagacgtggagaaatggggcccctttgacctggtgtacggctcgacgcagcccctaggcagctcttgtgatcgctgtcccggctggtacatgttccagttccaccggatcctgcagtatgcgctgcctcgccaggagagtcagcggcccttcttctggatattcatggacaatctgctgctgactgaggatgaccaagagacaactacccgcttccttcagacagaggctgtgaccctccaggatgtccgtggcagagactaccagaatgctatgcgggtgtggagcaacattccagggctgaagagcaagcatgcgcccctgaccccaaaggaagaagagtatctgcaagcccaagtcagaagcaggagcaagctggacgccccgaaagttgacctcctggtgaagaactgccttctcccgctgagagagtacttcaagtatttttctcaaaactcacttcctcttggagggccgagctctggcgcacccccaccaagtggagggtctcctgccgggtccccaacatctactgaagaaggcaccagcgaatccgcaacgcccgagtcaggccctggtacctccacagaaccatctgaaggtagtgcgcctggttccccagctggaagccctacttccaccgaagaaggcacgtcaaccgaaccaagtgaaggatctgcccctgggaccagcactgaaccatctgagccaaaaaagaagagaaaggtaatggacaagaagtacagcatcggcctggccatcggcaccaactctgtgggctgggccgtgatcaccgacgagtacaaggtgcccagcaagaaattcaaggtgctgggcaacaccgaccggcacagcatcaagaagaacctgatcggcgccctgctgttcgacagcggagaaacagccgaggccacccggctgaagagaaccgccagaagaagatacaccagacggaagaaccggatctgctatctgcaagagatcttcagcaacgagatggccaaggtggacgacagcttcttccacagactggaagagtccttcctggtggaagaggataagaagcacgagcggcaccccatcttcggcaacatcgtggacgaggtggcctaccacgagaagtaccccaccatctaccacctgagaaagaaactggtggacagcaccgacaaggccgacctgcggctgatctatctggccctggcccacatgatcaagttccggggccacttcctgatcgagggcgacctgaaccccgacaacagcgacgtggacaagctgttcatccagctggtgcagacctacaaccagctgttcgaggaaaaccccatcaacgccagcggcgtggacgccaaggccatcctgtctgccagactgagcaagagcagacggctggaaaatctgatcgcccagctgcccggcgagaagaagaatggcctgttcggcaacctgattgccctgagcctgggcctgacccccaacttcaagagcaacttcgacctggccgaggatgccaaactgcagctgagcaaggacacctacgacgacgacctggacaacctgctggcccagatcggcgaccagtacgccgacctgtttctggccgccaagaacctgtccgacgccatcctgctgagcgacatcctgagagtgaacaccgagatcaccaaggcccccctgagcgcctctatgatcaagagatacgacgagcaccaccaggacctgaccctgctgaaagctctcgtgcggcagcagctgcctgagaagtacaaagagattttcttcgaccagagcaagaacggctacgccggctacatcgatggcggagccagccaggaagagttctacaagttcatcaagcccatcctggaaaagatggacggcaccgaggaactgctcgtgaagctgaacagagaggacctgctgcggaagcagcggaccttcgacaacggcagcatcccccaccagatccacctgggagagctgcacgccattctgcggcggcaggaagatttttacccattcctgaaggacaaccgggaaaagatcgagaagatcctgaccttccgcatcccctactacgtgggccctctggccaggggaaacagcagattcgcctggatgaccagaaagagcgaggaaaccatcaccccctggaacttcgaggaagtggtggacaagggcgccagcgcccagagcttcatcgagcggatgaccaacttcgataagaacctgcccaacgagaaggtgctgcccaagcacagcctgctgtacgagtacttcaccgtgtacaacgagctgaccaaagtgaaatacgtgaccgagggaatgagaaagcccgccttcctgagcggcgagcagaaaaaagccatcgtggacctgctgttcaagaccaaccggaaagtgaccgtgaagcagctgaaagaggactacttcaagaaaatcgagtgcttcgactccgtggaaatctccggcgtggaagatcggttcaacgcctccctgggcacataccacgatctgctgaaaattatcaaggacaaggacttcctggacaatgaggaaaacgaggacattctggaagatatcgtgctgaccctgacactgtttgaggacagagagatgatcgaggaacggctgaaaacctatgcccacctgttcgacgacaaagtgatgaagcagctgaagcggcggagatacaccggctggggcaggctgagccggaagctgatcaacggcatccgggacaagcagtccggcaagacaatcctggatttcctgaagtccgacggcttcgccaacagaaacttcatgcagctgatccacgacgacagcctgacctttaaagaggacatccagaaagcccaggtgtccggccagggcgatagcctgcacgagcacattgccaatctggccggcagccccgccattaagaagggcatcctgcagacagtgaaggtggtggacgagctcgtgaaagtgatgggccggcacaagcccgagaacatcgtgatcgaaatggccagagagaaccagaccacccagaagggacagaagaacagccgcgagagaatgaagcggatcgaagagggcatcaaagagctgggcagccagatcctgaaagaacaccccgtggaaaacacccagctgcagaacgagaagctgtacctgtactacctgcagaatgggcgggatatgtacgtggaccaggaactggacatcaaccggctgtccgactacgatgtggacgctatcgtgcctcagagctttctgaaggacgactccatcgataacaaagtgctgactcggagcgacaagaaccggggcaagagcgacaacgtgccctccgaagaggtcgtgaagaagatgaagaactactggcgccagctgctgaatgccaagctgattacccagaggaagttcgacaatctgaccaaggccgagagaggcggcctgagcgaactggataaggccggcttcatcaagagacagctggtggaaacccggcagatcacaaagcacgtggcacagatcctggactcccggatgaacactaagtacgacgagaacgacaaactgatccgggaagtgaaagtgatcaccctgaagtccaagctggtgtccgatttccggaaggatttccagttttacaaagtgcgcgagatcaacaactaccaccacgcccacgacgcctacctgaacgccgtcgtgggaaccgccctgatcaaaaagtaccctaagctggaaagcgagttcgtgtacggcgactacaaggtgtacgacgtgcggaagatgatcgccaagagcgagcaggaaatcggcaaggctaccgccaagtacttcttctacagcaacatcatgaactttttcaagaccgagattaccctggccaacggcgagatccggaagcggcctctgatcgagacaaacggcgaaacaggcgagatcgtgtgggataagggccgggactttgccaccgtgcggaaagtgctgtctatgccccaagtgaatatcgtgaaaaagaccgaggtgcagacaggcggcttcagcaaagagtctatcctgcccaagaggaacagcgacaagctgatcgccagaaagaaggactgggaccctaagaagtacggcggcttcgacagccccaccgtggcctattctgtgctggtggtggccaaagtggaaaagggcaagtccaagaaactgaagagtgtgaaagagctgctggggatcaccatcatggaaagaagcagcttcgagaagaatcccatcgactttctggaagccaagggctacaaagaagtgaaaaaggacctgatcatcaagctgcctaagtactccctgttcgagctggaaaacggccggaagagaatgctggcctctgccggcgaactgcagaagggaaacgaactggccctgccctccaaatatgtgaacttcctgtacctggccagccactatgagaagctgaagggctcccccgaggataatgagcagaaacagctgtttgtggaacagcacaaacactacctggacgagatcatcgagcagatcagcgagttctccaagagagtgatcctggccgacgctaatctggacaaggtgctgagcgcctacaacaagcacagagacaagcctatcagagagcaggccgagaatatcatccacctgtttaccctgaccaatctgggagcccctgccgccttcaagtactttgacaccaccatcgaccggaagaggtacaccagcaccaaagaggtgctggacgccaccctgatccaccagagcatcaccggcctgtacgagacacggatcgacctgtctcagctgggaggcgacgcctatccctatgacgtgcccgattatgccagcctgggcagcggctcccccaagaaaaaacgcaaggtggaagatcctaagaaaaagcggaaagtggacggcagcggcagcgagacccccggtaccagcgagagcgccacccccgagagccggacactcgagacaattcttaaagatttattgccggaaacaatacctccacctgagttggatgatatgacactgtggcagattgttattaatatcctttcagaaccaccaaaaaggaaaaaaagaaaagatattaatacaattgaagatgctgtgaaattactgcaagagtgcaaaaaaattatagttctaactggagctggggtgtctgtttcatgtggaatacctgacttcaggtcaagggatggtatttatgctcgccttgctgtagacttcccagatcttccagatcctcaagcgatgtttgatattgaatatttcagaaaagatccaagaccattcttcaagtttgcaaaggaaatatatcctggacaattccagccatctctctgtcacaaattcatagccttgtcagataaggaaggaaaactacttcgcaactatacccagaacatagacacgctggaacaggttgcgggaatccaaaggataattcagtgtcatggttcctttgcaacagcatcttgcctgatttgtaaatacaaagttgactgtgaagctgtacgaggagatatttttaatcaggtagttcctcgatgtcctaggtgcccagctgatgaaccgcttgctatcatgaaaccagagattgtgttttttggtgaaaatttaccagaacagtttcatagagccatgaagtatgacaaagatgaagttgacctcctcattgttattgggtcttccctcaaagtaagaccagtagcactaattccaagttccataccccatgaagtgcctcagatattaattaatagagaacctttgcctcatctgcattttgatgtagagcttcttggagactgtgatgtcataattaatgaattgtgtcataggttaggtggtgaatatgccaaactttgagatcccaagcacgcagcaatgcagctcaaaacgcttagcctagccacacccccacgggaaacagcagtgattaacctttagcaataaacgaaagtttaactaagctatactaaccccagggttggtcaatttcgtgccagccacaccctggtactgcatgcacgcaatgctagctgcccctttcccgtcctgggcaccccgagtctcccccgaccccgggtcccaggtatgctcccacctccacctgccccactcaccacctctgctagttccagacacctccgagacgaggaaaaaaaaaaaaaaaaaaaaaaaaaaaaaaaaaaaaaaaaaaaaaaaaaaaaaaaaaaaaaaaaaaaaaaaaaaaaaaaaaaaaaaaaaaaaaaaaaaaaaaaaaaaaaaaaaaaaaaaaaaaaaaaaaaaaaaaaaaaaaaaaaaaaaaaaaaaaaaaaaaaaaaaaaaaaaaaaaaaaaaaaaaaaaaaaaaaaaaaaaaaaaaaaaaaaaaaaaaaaaaaaaaaaaaaaaaaaaaaaaaaaaaaaaaaaaaaaaaaaaaaaaaaaaaaaaaaaaaaaaaaaaaaaaaaaaaaaaaaaaaaaaaaaaaaaaaaaaaaaaaaaaaaaaaaaaaaaaaaaaaaaaaaaaaaaaaaaaaaaaaaaaaaaaaaaaaaaaaaaaaaaaaaaaaaaaaccgtcttcaagctttctagaaattcactggccgtcgttttacaacgtcgtgactgggaaaaccctggcgttacccaacttaatcgccttgcagcacatccccctttcgccagctggcgtaatagcgaagaggcccgcaccgatcgcccttcccaacagttgcgcagcctgaatggcgaatggcgcctgatgcggtattttctccttacgcatctgtgcggtatttcacaccgcatatggtgcactctcagtacaatctgctctgatgccgcatagttaagccagccccgacacccgccaacacccgctgacgcgccctgacgggcttgtctgctcccggcatccgcttacagacaagctgtgaccgtctccgggagctgcatgtgtcagaggttttcaccgtcatcaccgaaacgcgcgagacgaaagggcctcgtgatacgcctatttttataggttaatgtcatgataataatggtttcttagacgtcaggtggcacttttcggggaaatgtgcgcggaacccctatttgtttatttttctaaatacattcaaatatgtatccgctcatgagacaataaccctgataaatgcttcaataatattgaaaaaggaagagtatgagtattcaacatttccgtgtcgcccttattcccttttttgcggcattttgccttcctgtttttgctcacccagaaacgctggtgaaagtaaaagatgctgaagatcagttgggtgcacgagtgggttacatcgaactggatctcaacagcggtaagatccttgagagttttcgccccgaagaacgttttccaatgatgagcacttttaaagttctgctatgtggcgcggtattatcccgtattgacgccgggcaagagcaactcggtcgccgcatacactattctcagaatgacttggttgagtactcaccagtcacagaaaagcatcttacggatggcatgacagtaagagaattatgcagtgctgccataaccatgagtgataacactgcggccaacttacttctgacaacgatcggaggaccgaaggagctaaccgcttttttgcacaacatgggggatcatgtaactcgccttgatcgttgggaaccggagctgaatgaagccataccaaacgacgagcgtgacaccacgatgcctgtagcaatggcaacaacgttgcgcaaactattaactggcgaactacttactctagcttcccggcaacaattaatagactggatggaggcggataaagttgcaggaccacttctgcgctcggcccttccggctggctggtttattgctgataaatctggagccggtgagcgtgggtctcgcggtatcattgcagcactggggccagatggtaagccctcccgtatcgtagttatctacacgacggggagtcaggcaactatggatgaacgaaatagacagatcgctgagataggtgcctcactgattaagcattggtaactgtcagaccaagtttactcatatatactttagattgatttaaaacttcatttttaatttaaaaggatctaggtgaagatcctttttgataatctcatgaccaaaatcccttaacgtgagttttcgttccactgagcgtcagaccccgtagaaaagatcaaaggatcttcttgagatcctttttttctgcgcgtaatctgctgcttgcaaacaaaaaaaccaccgctaccagcggtggtttgtttgccggatcaagagctaccaactctttttccgaaggtaactggcttcagcagagcgcagataccaaatactgttcttctagtgtagccgtagttaggccaccacttcaagaactctgtagcaccgcctacatacctcgctctgctaatcctgttaccagtggctgctgccagtggcgataagtcgtgtcttaccgggttggactcaagacgatagttaccggataaggcgcagcggtcgggctgaacggggggttcgtgcacacagcccagcttggagcgaacgacctacaccgaactgagatacctacagcgtgagctatgagaaagcgccacgcttcccgaagggagaaaggcggacaggtatccggtaagcggcagggtcggaacaggagagcgcacgagggagcttccagggggaaacgcctggtatctttatagtcctgtcgggtttcgccacctctgacttgagcgtcgatttttgtgatgctcgtcaggggggcggagcctatggaaaaacgccagcaacgcggcctttttacggttcctggccttttgctggccttttgctcacatgttctttcctgcgttatcccctgattctgtggataaccgtattaccgcctttgagtgagctgataccgctcgccgcagccgaacgaccgagcgcagcgagtcagtgagcgaggaagcggaagagcgcccaatacgcaaaccgcctctccccgcgcgttggccgattcattaatgcagctggcacgacaggtttcccgactggaaagcgggcagtgagcgcaacgcaattaatgtgagttagctcactcattaggcaccccaggctttacactttatgcttccggctcgtatgttgtgtggaattgtgagcggataacaatttcacacaggaaacagctatgaccatgattacgcctctagaaagctttaatacgactcactataaggactcactatttgttttcgcgcccagttgcaaaaagtgtcgacatttgcttctgacacaactgtgttcactagcaacctcaaacagacaccgccaccatgcctgctgctaagagagtgaaactggatggatccaccgg

SEQ ID NO: 190 - DNA, 11592 bp, synthetic construct
  misc_feature 1..11592: note = V72 DNA
  source 1..11592: mol_type = other DNA
tccagccaccatgaaccatgaccaggaatttgaccccccaaaggtttacccacctgtgccagctgagaagaggaagcccatccgcgtgctgtctctctttgatgggattgctacagggctcctggtgctgaaggacctgggcatccaagtggaccgctacattgcctccgaggtgtgtgaggactccatcacggtgggcatggtgcggcaccagggaaagatcatgtacgtcggggacgtccgcagcgtcacacagaagcatatccaggagtggggcccattcgacctggtgattggaggcagtccctgcaatgacctctccattgtcaaccctgcccgcaagggactttatgagggtactggccgcctcttctttgagttctaccgcctcctgcatgatgcgcggcccaaggagggagatgatcgccccttcttctggctctttgagaatgtggtggccatgggcgttagtgacaagagggacatctcgcgatttcttgagtctaaccccgtgatgattgacgccaaagaagtgtctgctgcacacagggcccgttacttctggggtaaccttcctggcatgaacaggcctttggcatccactgtgaatgataagctggagctgcaagagtgtctggagcacggcagaatagccaagttcagcaaagtgaggaccattaccaccaggtcaaactctataaagcagggcaaagaccagcatttccccgtcttcatgaacgagaaggaggacatcctgtggtgcactgaaatggaaagggtgtttggcttccccgtccactacacagacgtctccaacatgagccgcttggcgaggcagagactgctgggccgatcgtggagcgtgccggtcatccgccacctcttcgctccgctgaaggaatattttgcttgtgtgtctagcggcaatagtaacgctaacagccgcgggccgagcttcagcagcggcctggtgccgttaagcttgcgcggcagccatatgggccctatggagatatacaagacagtgtctgcatggaagagacagccagtgcgggtactgagcctcttcagaaacatcgacaaggtactaaagagtttgggcttcttggaaagcggttctggttctgggggaggaacgctgaagtacgtggaagatgtcacaaatgtcgtgaggagagacgtggagaaatggggcccctttgacctggtgtacggctcgacgcagcccctaggcagctcttgtgatcgctgtcccggctggtacatgttccagttccaccggatcctgcagtatgcgctgcctcgccaggagagtcagcggcccttcttctggatattcatggacaatctgctgctgactgaggatgaccaagagacaactacccgcttccttcagacagaggctgtgaccctccaggatgtccgtggcagagactaccagaatgctatgcgggtgtggagcaacattccagggctgaagagcaagcatgcgcccctgaccccaaaggaagaagagtatctgcaagcccaagtcagaagcaggagcaagctggacgccccgaaagttgacctcctggtgaagaactgccttctcccgctgagagagtacttcaagtatttttctcaaaactcacttcctcttggagggccgagctctggcgcacccccaccaagtggagggtctcctgccgggtccccaacatctactgaagaaggcaccagcgaatccgcaacgcccgagtcaggccctggtacctccacagaaccatctgaaggtagtgcgcctggttccccagctggaagccctacttccaccgaagaaggcacgtcaaccgaaccaagtgaaggatctgcccctgggaccagcactgaaccatctgagccaaaaaagaagagaaaggtaatggacaagaagtacagcatcggcctggccatcggcaccaactctgtgggctgggccgtgatcaccgacgagtacaaggtgcccagcaagaaattcaaggtgctgggcaacaccgaccggcacagcatcaagaagaacctgatcggcgccctgctgttcgacagcggagaaacagccgaggccacccggctgaagagaaccgccagaagaagatacaccagacggaagaaccggatctgctatctgcaagagatcttcagcaacgagatggccaaggtggacgacagcttcttccacagactggaagagtccttcctggtggaagaggataagaagcacgagcggcaccccatcttcggcaacatcgtggacgaggtggcctaccacgagaagtaccccaccatctaccacctgagaaagaaactggtggacagcaccgacaaggccgacctgcggctgatctatctggccctggcccacatgatcaagttccggggccacttcctgatcgagggcgacctgaaccccgacaacagcgacgtggacaagctgttcatccagctggtgcagacctacaaccagctgttcgaggaaaaccccatcaacgccagcggcgtggacgccaaggccatcctgtctgccagactgagcaagagcagacggctggaaaatctgatcgcccagctgcccggcgagaagaagaatggcctgttcggcaacctgattgccctgagcctgggcctgacccccaacttcaagagcaacttcgacctggccgaggatgccaaactgcagctgagcaaggacacctacgacgacgacctggacaacctgctggcccagatcggcgaccagtacgccgacctgtttctggccgccaagaacctgtccgacgccatcctgctgagcgacatcctgagagtgaacaccgagatcaccaaggcccccctgagcgcctctatgatcaagagatacgacgagcaccaccaggacctgaccctgctgaaagctctcgtgcggcagcagctgcctgagaagtacaaagagattttcttcgaccagagcaagaacggctacgccggctacatcgatggcggagccagccaggaagagttctacaagttcatcaagcccatcctggaaaagatggacggcaccgaggaactgctcgtgaagctgaacagagaggacctgctgcggaagcagcggaccttcgacaacggcagcatcccccaccagatccacctgggagagctgcacgccattctgcggcggcaggaagatttttacccattcctgaaggacaaccgggaaaagatcgagaagatcctgaccttccgcatcccctactacgtgggccctctggccaggggaaacagcagattcgcctggatgaccagaaagagcgaggaaaccatcaccccctggaacttcgaggaagtggtggacaagggcgccagcgcccagagcttcatcgagcggatgaccaacttcgataagaacctgcccaacgagaaggtgctgcccaagcacagcctgctgtacgagtacttcaccgtgtacaacgagctgaccaaagtgaaatacgtgaccgagggaatgagaaagcccgccttcctgagcggcgagcagaaaaaagccatcgtggacctgctgttcaagaccaaccggaaagtgaccgtgaagcagctgaaagaggactacttcaagaaaatcgagtgcttcgactccgtggaaatctccggcgtggaagatcggttcaacgcctccctgggcacataccacgatctgctgaaaattatcaaggacaaggacttcctggacaatgaggaaaacgaggacattctggaagatatcgtgctgaccctgacactgtttgaggacagagagatgatcgaggaacggctgaaaacctatgcccacctgttcgacgacaaagtgatgaagcagctgaagcggcggagatacaccggctggggcaggctgagccggaagctgatcaacggcatccgggacaagcagtccggcaagacaatcctggatttcctgaagtccgacggcttcgccaacagaaacttcatgcagctgatccacgacgacagcctgacctttaaagaggacatccagaaagcccaggtgtccggccagggcgatagcctgcacgagcacattgccaatctggccggcagccccgccattaagaagggcatcctgcagacagtgaaggtggtggacgagctcgtgaaagtgatgggccggcacaagcccgagaacatcgtgatcgaaatggccagagagaaccagaccacccagaagggacagaagaacagccgcgagagaatgaagcggatcgaagagggcatcaaagagctgggcagccagatcctgaaagaacaccccgtggaaaacacccagctgcagaacgagaagctgtacctgtactacctgcagaatgggcgggatatgtacgtggaccaggaactggacatcaaccggctgtccgactacgatgtggacgctatcgtgcctcagagctttctgaaggacgactccatcgataacaaagtgctgactcggagcgacaagaaccggggcaagagcgacaacgtgccctccgaagaggtcgtgaagaagatgaagaactactggcgccagctgctgaatgccaagctgattacccagaggaagttcgacaatctgaccaaggccgagagaggcggcctgagcgaactggataaggccggcttcatcaagagacagctggtggaaacccggcagatcacaaagcacgtggcacagatcctggactcccggatgaacactaagtacgacgagaacgacaaactgatccgggaagtgaaagtgatcaccctgaagtccaagctggtgtccgatttccggaaggatttccagttttacaaagtgcgcgagatcaacaactaccaccacgcccacgacgcctacctgaacgccgtcgtgggaaccgccctgatcaaaaagtaccctaagctggaaagcgagttcgtgtacggcgactacaaggtgtacgacgtgcggaagatgatcgccaagagcgagcaggaaatcggcaaggctaccgccaagtacttcttctacagcaacatcatgaactttttcaagaccgagattaccctggccaacggcgagatccggaagcggcctctgatcgagacaaacggcgaaacaggcgagatcgtgtgggataagggccgggactttgccaccgtgcggaaagtgctgtctatgccccaagtgaatatcgtgaaaaagaccgaggtgcagacaggcggcttcagcaaagagtctatcctgcccaagaggaacagcgacaagctgatcgccagaaagaaggactgggaccctaagaagtacggcggcttcgacagccccaccgtggcctattctgtgctggtggtggccaaagtggaaaagggcaagtccaagaaactgaagagtgtgaaagagctgctggggatcaccatcatggaaagaagcagcttcgagaagaatcccatcgactttctggaagccaagggctacaaagaagtgaaaaaggacctgatcatcaagctgcctaagtactccctgttcgagctggaaaacggccggaagagaatgctggcctctgccggcgaactgcagaagggaaacgaactggccctgccctccaaatatgtgaacttcctgtacctggccagccactatgagaagctgaagggctcccccgaggataatgagcagaaacagctgtttgtggaacagcacaaacactacctggacgagatcatcgagcagatcagcgagttctccaagagagtgatcctggccgacgctaatctggacaaggtgctgagcgcctacaacaagcacagagacaagcctatcagagagcaggccgagaatatcatccacctgtttaccctgaccaatctgggagcccctgccgccttcaagtactttgacaccaccatcgaccggaagaggtacaccagcaccaaagaggtgctggacgccaccctgatccaccagagcatcaccggcctgtacgagacacggatcgacctgtctcagctgggaggcgacgcctatccctatgacgtgcccgattatgccagcctgggcagcggctcccccaagaaaaaacgcaaggtggaagatcctaagaaaaagcggaaagtggacggcagcggcagcgagacccccggtaccagcgagagcgccacccccgagagccggacactcgagatggcggcgatggcggtcgggggtgctggtgggagccgcgtgtccagcgggagggacctgaattgcgtccccgaaatagctgacacactaggggctgtggccaagcaggggtttgatttcctctgcatgcctgtcttccatccgcgtttcaagagggagttcattcaggaacctgctaagaatcggcccggtccccagacacgatcagacctactgctgtcaggaagggactggaatacgctaattgtgggaaagctttctccatggattcgtccagactcaaaagtggagaagattcgcaggaactccgaggcggccatgttacaggagctgaattttggtgcatatttgggtcttccagctttcctgctgccccttaatcaggaagataacaccaacctggccagagttttgaccaaccacatccacactggccatcactcttccatgttctggatgcgggtacccttggtggcaccagaggacctgagagatgatataattgagaatgcaccaactacacacacagaggagtacagtggggaggagaaaacgtggatgtggtggcacaacttccggactttgtgtgactatagtaagaggattgcagtggctcttgaaattggggctgacctcccatctaatcatgtcattgatcgctggcttggggagcccatcaaagcagccattctccccactagcattttcctgaccaataagaagggatttcctgttctttctaagatgcaccagaggctcatcttccggctcctcaagttggaggtgcagttcatcatcacaggcaccaaccaccactcagagaaggagttctgctcctacctccaatacctggaatacttaagccagaaccgtcctccacctaatgcctatgaactctttgccaagggctatgaagactatctgcagtccccgcttcagccactgatggacaatctggaatctcagacatatgaagtgtttgaaaaggaccccatcaaatactctcagtaccagcaggccatctataaatgtctgctagaccgagtaccagaagaggagaaggataccaatgtccaggtactgatggtgctgggagcaggacggggacccctggtgaacgcttccctgcgggcagccaagcaggccgaccggcggataaagctgtatgctgtggagaaaaacccaaatgccgtggtgacgctagagaactggcagtttgaagaatggggaagccaagtgaccgtagtctcatcagacatgagggaatgggtggctccagagaaagcagacatcattgtcagtgagcttctgggctcatttgctgacaatgaattgtcgcctgagtgcctggatggagcccagcacttcctaaaagatgatggtgtgagcatccccggggagtacacttcctttctggctcccatctcttcctccaagctgtacaatgaggtccgagcctgtagggagaaggaccgtgaccctgaggcccagtttgagatgccttatgtggtacggctgcacaacttccaccagctctctgcaccccagccctgtttcaccttcagccatcccaacagagatcctatgattgacaacaaccgctattgcaccttggaatttcctgtggaggtgaacacagtactacatggctttgccggctactttgagactgtgctttatcaggacatcactctgagtatccgtccagagactcactctcctgggatgttctcatggtttcccatcctcttccctattaagcagcccataacggtacgtgaaggccaaaccatctgtgtgcgtttctggcgatgcagcaattccaagaaggtgtggtatgagtgggctgtgacagcaccagtctgttctgctattcataaccccacaggccgctcatataccattggcctctgagatcccaagcacgcagcaatgcagctcaaaacgcttagcctagccacacccccacgggaaacagcagtgattaacctttagcaataaacgaaagtttaactaagctatactaaccccagggttggtcaatttcgtgccagccacaccctggtactgcatgcacgcaatgctagctgcccctttcccgtcctgggcaccccgagtctcccccgaccccgggtcccaggtatgctcccacctccacctgccccactcaccacctctgctagttccagacacctccgagacgaggaaaaaaaaaaaaaaaaaaaaaaaaaaaaaaaaaaaaaaaaaaaaaaaaaaaaaaaaaaaaaaaaaaaaaaaaaaaaaaaaaaaaaaaaaaaaaaaaaaaaaaaaaaaaaaaaaaaaaaaaaaaaaaaaaaaaaaaaaaaaaaaaaaaaaaaaaaaaaaaaaaaaaaaaaaaaaaaaaaaaaaaaaaaaaaaaaaaaaaaaaaaaaaaaaaaaaaaaaaaaaaaaaaaaaaaaaaaaaaaaaaaaaaaaaaaaaaaaaaaaaaaaaaaaaaaaaaaaaaaaaaaaaaaaaaaaaaaaaaaaaaaaaaaaaaaaaaaaaaaaaaaaaaaaaaaaaaaaaaaaaaaaaaaaaaaaaaaaaaaaaaaaaaaaaaaaaaaaaaaaaaaaaaaaaaaaaaccgtcttcaagctttctagaaattcactggccgtcgttttacaacgtcgtgactgggaaaaccctggcgttacccaacttaatcgccttgcagcacatccccctttcgccagctggcgtaatagcgaagaggcccgcaccgatcgcccttcccaacagttgcgcagcctgaatggcgaatggcgcctgatgcggtattttctccttacgcatctgtgcggtatttcacaccgcatatggtgcactctcagtacaatctgctctgatgccgcatagttaagccagccccgacacccgccaacacccgctgacgcgccctgacgggcttgtctgctcccggcatccgcttacagacaagctgtgaccgtctccgggagctgcatgtgtcagaggttttcaccgtcatcaccgaaacgcgcgagacgaaagggcctcgtgatacgcctatttttataggttaatgtcatgataataatggtttcttagacgtcaggtggcacttttcggggaaatgtgcgcggaacccctatttgtttatttttctaaatacattcaaatatgtatccgctcatgagacaataaccctgataaatgcttcaataatattgaaaaaggaagagtatgagtattcaacatttccgtgtcgcccttattcccttttttgcggcattttgccttcctgtttttgctcacccagaaacgctggtgaaagtaaaagatgctgaagatcagttgggtgcacgagtgggttacatcgaactggatctcaacagcggtaagatccttgagagttttcgccccgaagaacgttttccaatgatgagcacttttaaagttctgctatgtggcgcggtattatcccgtattgacgccgggcaagagcaactcggtcgccgcatacactattctcagaatgacttggttgagtactcaccagtcacagaaaagcatcttacggatggcatgacagtaagagaattatgcagtgctgccataaccatgagtgataacactgcggccaacttacttctgacaacgatcggaggaccgaaggagctaaccgcttttttgcacaacatgggggatcatgtaactcgccttgatcgttgggaaccggagctgaatgaagccataccaaacgacgagcgtgacaccacgatgcctgtagcaatggcaacaacgttgcgcaaactattaactggcgaactacttactctagcttcccggcaacaattaatagactggatggaggcggataaagttgcaggaccacttctgcgctcggcccttccggctggctggtttattgctgataaatctggagccggtgagcgtgggtctcgcggtatcattgcagcactggggccagatggtaagccctcccgtatcgtagttatctacacgacggggagtcaggcaactatggatgaacgaaatagacagatcgctgagataggtgcctcactgattaagcattggtaactgtcagaccaagtttactcatatatactttagattgatttaaaacttcatttttaatttaaaaggatctaggtgaagatcctttttgataatctcatgaccaaaatcccttaacgtgagttttcgttccactgagcgtcagaccccgtagaaaagatcaaaggatcttcttgagatcctttttttctgcgcgtaatctgctgcttgcaaacaaaaaaaccaccgctaccagcggtggtttgtttgccggatcaagagctaccaactctttttccgaaggtaactggcttcagcagagcgcagataccaaatactgttcttctagtgtagccgtagttaggccaccacttcaagaactctgtagcaccgcctacatacctcgctctgctaatcctgttaccagtggctgctgccagtggcgataagtcgtgtcttaccgggttggactcaagacgatagttaccggataaggcgcagcggtcgggctgaacggggggttcgtgcacacagcccagcttggagcgaacgacctacaccgaactgagatacctacagcgtgagctatgagaaagcgccacgcttcccgaagggagaaaggcggacaggtatccggtaagcggcagggtcggaacaggagagcgcacgagggagcttccagggggaaacgcctggtatctttatagtcctgtcgggtttcgccacctctgacttgagcgtcgatttttgtgatgctcgtcaggggggcggagcctatggaaaaacgccagcaacgcggcctttttacggttcctggccttttgctggccttttgctcacatgttctttcctgcgttatcccctgattctgtggataaccgtattaccgcctttgagtgagctgataccgctcgccgcagccgaacgaccgagcgcagcgagtcagtgagcgaggaagcggaagagcgcccaatacgcaaaccgcctctccccgcgcgttggccgattcattaatgcagctggcacgacaggtttcccgactggaaagcgggcagtgagcgcaacgcaattaatgtgagttagctcactcattaggcaccccaggctttacactttatgcttccggctcgtatgttgtgtggaattgtgagcggataacaatttcacacaggaaacagctatgaccatgattacgcctctagaaagctttaatacgactcactataaggactcactatttgttttcgcgcccagttgcaaaaagtgtcgacatttgcttctgacacaactgtgttcactagcaacctcaaacagacaccgccaccatgcctgctgctaagagagtgaaactggatggatccaccgg

SEQ ID NO: 191 - DNA, 10248 bp, synthetic construct
  misc_feature 1..10248: note = V73 DNA
  source 1..10248: mol_type = other DNA
tccagccaccatgaaccatgaccaggaatttgaccccccaaaggtttacccacctgtgccagctgagaagaggaagcccatccgcgtgctgtctctctttgatgggattgctacagggctcctggtgctgaaggacctgggcatccaagtggaccgctacattgcctccgaggtgtgtgaggactccatcacggtgggcatggtgcggcaccagggaaagatcatgtacgtcggggacgtccgcagcgtcacacagaagcatatccaggagtggggcccattcgacctggtgattggaggcagtccctgcaatgacctctccattgtcaaccctgcccgcaagggactttatgagggtactggccgcctcttctttgagttctaccgcctcctgcatgatgcgcggcccaaggagggagatgatcgccccttcttctggctctttgagaatgtggtggccatgggcgttagtgacaagagggacatctcgcgatttcttgagtctaaccccgtgatgattgacgccaaagaagtgtctgctgcacacagggcccgttacttctggggtaaccttcctggcatgaacaggcctttggcatccactgtgaatgataagctggagctgcaagagtgtctggagcacggcagaatagccaagttcagcaaagtgaggaccattaccaccaggtcaaactctataaagcagggcaaagaccagcatttccccgtcttcatgaacgagaaggaggacatcctgtggtgcactgaaatggaaagggtgtttggcttccccgtccactacacagacgtctccaacatgagccgcttggcgaggcagagactgctgggccgatcgtggagcgtgccggtcatccgccacctcttcgctccgctgaaggaatattttgcttgtgtgtctagcggcaatagtaacgctaacagccgcgggccgagcttcagcagcggcctggtgccgttaagcttgcgcggcagccatatgggccctatggagatatacaagacagtgtctgcatggaagagacagccagtgcgggtactgagcctcttcagaaacatcgacaaggtactaaagagtttgggcttcttggaaagcggttctggttctgggggaggaacgctgaagtacgtggaagatgtcacaaatgtcgtgaggagagacgtggagaaatggggcccctttgacctggtgtacggctcgacgcagcccctaggcagctcttgtgatcgctgtcccggctggtacatgttccagttccaccggatcctgcagtatgcgctgcctcgccaggagagtcagcggcccttcttctggatattcatggacaatctgctgctgactgaggatgaccaagagacaactacccgcttccttcagacagaggctgtgaccctccaggatgtccgtggcagagactaccagaatgctatgcgggtgtggagcaacattccagggctgaagagcaagcatgcgcccctgaccccaaaggaagaagagtatctgcaagcccaagtcagaagcaggagcaagctggacgccccgaaagttgacctcctggtgaagaactgccttctcccgctgagagagtacttcaagtatttttctcaaaactcacttcctcttggagggccgagctctggcgcacccccaccaagtggagggtctcctgccgggtccccaacatctactgaagaaggcaccagcgaatccgcaacgcccgagtcaggccctggtacctccacagaaccatctgaaggtagtgcgcctggttccccagctggaagccctacttccaccgaagaaggcacgtcaaccgaaccaagtgaaggatctgcccctgggaccagcactgaaccatctgagccaaaaaagaagagaaaggtaatggacaagaagtacagcatcggcctggccatcggcaccaactctgtgggctgggccgtgatcaccgacgagtacaaggtgcccagcaagaaattcaaggtgctgggcaacaccgaccggcacagcatcaagaagaacctgatcggcgccctgctgttcgacagcggagaaacagccgaggccacccggctgaagagaaccgccagaagaagatacaccagacggaagaaccggatctgctatctgcaagagatcttcagcaacgagatggccaaggtggacgacagcttcttccacagactggaagagtccttcctggtggaagaggataagaagcacgagcggcaccccatcttcggcaacatcgtggacgaggtggcctaccacgagaagtaccccaccatctaccacctgagaaagaaactggtggacagcaccgacaaggccgacctgcggctgatctatctggccctggcccacatgatcaagttccggggccacttcctgatcgagggcgacctgaaccccgacaacagcgacgtggacaagctgttcatccagctggtgcagacctacaaccagctgttcgaggaaaaccccatcaacgccagcggcgtggacgccaaggccatcctgtctgccagactgagcaagagcagacggctggaaaatctgatcgcccagctgcccggcgagaagaagaatggcctgttcggcaacctgattgccctgagcctgggcctgacccccaacttcaagagcaacttcgacctggccgaggatgccaaactgcagctgagcaaggacacctacgacgacgacctggacaacctgctggcccagatcggcgaccagtacgccgacctgtttctggccgccaagaacctgtccgacgccatcctgctgagcgacatcctgagagtgaacaccgagatcaccaaggcccccctgagcgcctctatgatcaagagatacgacgagcaccaccaggacctgaccctgctgaaagctctcgtgcggcagcagctgcctgagaagtacaaagagattttcttcgaccagagcaagaacggctacgccggctacatcgatggcggagccagccaggaagagttctacaagttcatcaagcccatcctggaaaagatggacggcaccgaggaactgctcgtgaagctgaacagagaggacctgctgcggaagcagcggaccttcgacaacggcagcatcccccaccagatccacctgggagagctgcacgccattctgcggcggcaggaagatttttacccattcctgaaggacaaccgggaaaagatcgagaagatcctgaccttccgcatcccctactacgtgggccctctggccaggggaaacagcagattcgcctggatgaccagaaagagcgaggaaaccatcaccccctggaacttcgaggaagtggtggacaagggcgccagcgcccagagcttcatcgagcggatgaccaacttcgataagaacctgcccaacgagaaggtgctgcccaagcacagcctgctgtacgagtacttcaccgtgtacaacgagctgaccaaagtgaaatacgtgaccgagggaatgagaaagcccgccttcctgagcggcgagcagaaaaaagccatcgtggacctgctgttcaagaccaaccggaaagtgaccgtgaagcagctgaaagaggactacttcaagaaaatcgagtgcttcgactccgtggaaatctccggcgtggaagatcggttcaacgcctccctgggcacataccacgatctgctgaaaattatcaaggacaaggacttcctggacaatgaggaaaacgaggacattctggaagatatcgtgctgaccctgacactgtttgaggacagagagatgatcgaggaacggctgaaaacctatgcccacctgttcgacgacaaagtgatgaagcagctgaagcggcggagatacaccggctggggcaggctgagccggaagctgatcaacggcatccgggacaagcagtccggcaagacaatcctggatttcctgaagtccgacggcttcgccaacagaaacttcatgcagctgatccacgacgacagcctgacctttaaagaggacatccagaaagcccaggtgtccggccagggcgatagcctgcacgagcacattgccaatctggccggcagccccgccattaagaagggcatcctgcagacagtgaaggtggtggacgagctcgtgaaagtgatgggccggcacaagcccgagaacatcgtgatcgaaatggccagagagaaccagaccacccagaagggacagaagaacagccgcgagagaatgaagcggatcgaagagggcatcaaagagctgggcagccagatcctgaaagaacaccccgtggaaaacacccagctgcagaacgagaagctgtacctgtactacctgcagaatgggcgggatatgtacgtggaccaggaactggacatcaaccggctgtccgactacgatgtggacgctatcgtgcctcagagctttctgaaggacgactccatcgataacaaagtgctgactcggagcgacaagaaccggggcaagagcgacaacgtgccctccgaagaggtcgtgaagaagatgaagaactactggcgccagctgctgaatgccaagctgattacccagaggaagttcgacaatctgaccaaggccgagagaggcggcctgagcgaactggataaggccggcttcatcaagagacagctggtggaaacccggcagatcacaaagcacgtggcacagatcctggactcccggatgaacactaagtacgacgagaacgacaaactgatccgggaagtgaaagtgatcaccctgaagtccaagctggtgtccgatttccggaaggatttccagttttacaaagtgcgcgagatcaacaactaccaccacgcccacgacgcctacctgaacgccgtcgtgggaaccgccctgatcaaaaagtaccctaagctggaaagcgagttcgtgtacggcgactacaaggtgtacgacgtgcggaagatgatcgccaagagcgagcaggaaatcggcaaggctaccgccaagtacttcttctacagcaacatcatgaactttttcaagaccgagattaccctggccaacggcgagatccggaagcggcctctgatcgagacaaacggcgaaacaggcgagatcgtgtgggataagggccgggactttgccaccgtgcggaaagtgctgtctatgccccaagtgaatatcgtgaaaaagaccgaggtgcagacaggcggcttcagcaaagagtctatcctgcccaagaggaacagcgacaagctgatcgccagaaagaaggactgggaccctaagaagtacggcggcttcgacagccccaccgtggcctattctgtgctggtggtggccaaagtggaaaagggcaagtccaagaaactgaagagtgtgaaagagctgctggggatcaccatcatggaaagaagcagcttcgagaagaatcccatcgactttctggaagccaagggctacaaagaagtgaaaaaggacctgatcatcaagctgcctaagtactccctgttcgagctggaaaacggccggaagagaatgctggcctctgccggcgaactgcagaagggaaacgaactggccctgccctccaaatatgtgaacttcctgtacctggccagccactatgagaagctgaagggctcccccgaggataatgagcagaaacagctgtttgtggaacagcacaaacactacctggacgagatcatcgagcagatcagcgagttctccaagagagtgatcctggccgacgctaatctggacaaggtgctgagcgcctacaacaagcacagagacaagcctatcagagagcaggccgagaatatcatccacctgtttaccctgaccaatctgggagcccctgccgccttcaagtactttgacaccaccatcgaccggaagaggtacaccagcaccaaagaggtgctggacgccaccctgatccaccagagcatcaccggcctgtacgagacacggatcgacctgtctcagctgggaggcgacgcctatccctatgacgtgcccgattatgccagcctgggcagcggctcccccaagaaaaaacgcaaggtggaagatcctaagaaaaagcggaaagtggacggcagcggcagcgagacccccggtaccagcgagagcgccacccccgagagccggacactcggaaagaaaaccaagcggacagctgacagttcttcttcagaggatgaggaggagtatgttgtggagaaggtgctagacaggcgcgtggttaagggacaagtggaatatctactgaagtggaaaggcttttctgaggagcacaatacttgggaacctgagaaaaacttggattgccctgagctaatttctgaatttatgaaaaagtataagaagatgaaggagggtgaaaataataaacccagggagaagtcagaaagtaacaagaggaaatccaatttctcaaacagtgccgatgacatcaaatctaaaaaaaagagagagcagagcaatgatatcgctcggggctttgagagaggactggaaccagaaaagatcattggggcaacagattcctgtggtgatttaatgttcctaatgaaatggaaagacacagatgaagctgacctggttcttgcaaaagaagctaatgtgaaatgtccacaaattgtgatagcattttatgaagagagactgacatggcatgcatatcctgaggatgcggaaaacaaagagaaagaaacagcaaagagctgagatcccaagcacgcagcaatgcagctcaaaacgcttagcctagccacacccccacgggaaacagcagtgattaacctttagcaataaacgaaagtttaactaagctatactaaccccagggttggtcaatttcgtgccagccacaccctggtactgcatgcacgcaatgctagctgcccctttcccgtcctgggcaccccgagtctcccccgaccccgggtcccaggtatgctcccacctccacctgccccactcaccacctctgctagttccagacacctccgagacgaggaaaaaaaaaaaaaaaaaaaaaaaaaaaaaaaaaaaaaaaaaaaaaaaaaaaaaaaaaaaaaaaaaaaaaaaaaaaaaaaaaaaaaaaaaaaaaaaaaaaaaaaaaaaaaaaaaaaaaaaaaaaaaaaaaaaaaaaaaaaaaaaaaaaaaaaaaaaaaaaaaaaaaaaaaaaaaaaaaaaaaaaaaaaaaaaaaaaaaaaaaaaaaaaaaaaaaaaaaaaaaaaaaaaaaaaaaaaaaaaaaaaaaaaaaaaaaaaaaaaaaaaaaaaaaaaaaaaaaaaaaaaaaaaaaaaaaaaaaaaaaaaaaaaaaaaaaaaaaaaaaaaaaaaaaaaaaaaaaaaaaaaaaaaaaaaaaaaaaaaaaaaaaaaaaaaaaaaaaaaaaaaaaaaaaaaaaaccgtcttcaagctttctagaaattcactggccgtcgttttacaacgtcgtgactgggaaaaccctggcgttacccaacttaatcgccttgcagcacatccccctttcgccagctggcgtaatagcgaagaggcccgcaccgatcgcccttcccaacagttgcgcagcctgaatggcgaatggcgcctgatgcggtattttctccttacgcatctgtgcggtatttcacaccgcatatggtgcactctcagtacaatctgctctgatgccgcatagttaagccagccccgacacccgccaacacccgctgacgcgccctgacgggcttgtctgctcccggcatccgcttacagacaagctgtgaccgtctccgggagctgcatgtgtcagaggttttcaccgtcatcaccgaaacgcgcgagacgaaagggcctcgtgatacgcctatttttataggttaatgtcatgataataatggtttcttagacgtcaggtggcacttttcggggaaatgtgcgcggaacccctatttgtttatttttctaaatacattcaaatatgtatccgctcatgagacaataaccctgataaatgcttcaataatattgaaaaaggaagagtatgagtattcaacatttccgtgtcgcccttattcccttttttgcggcattttgccttcctgtttttgctcacccagaaacgctggtgaaagtaaaagatgctgaagatcagttgggtgcacgagtgggttacatcgaactggatctcaacagcggtaagatccttgagagttttcgccccgaagaacgttttccaatgatgagcacttttaaagttctgctatgtggcgcggtattatcccgtattgacgccgggcaagagcaactcggtcgccgcatacactattctcagaatgacttggttgagtactcaccagtcacagaaaagcatcttacggatggcatgacagtaagagaattatgcagtgctgccataaccatgagtgataacactgcggccaacttacttctgacaacgatcggaggaccgaaggagctaaccgcttttttgcacaacatgggggatcatgtaactcgccttgatcgttgggaaccggagctgaatgaagccataccaaacgacgagcgtgacaccacgatgcctgtagcaatggcaacaacgttgcgcaaactattaactggcgaactacttactctagcttcccggcaacaattaatagactggatggaggcggataaagttgcaggaccacttctgcgctcggcccttccggctggctggtttattgctgataaatctggagccggtgagcgtgggtctcgcggtatcattgcagcactggggccagatggtaagccctcccgtatcgtagttatctacacgacggggagtcaggcaactatggatgaacgaaatagacagatcgctgagataggtgcctcactgattaagcattggtaactgtcagaccaagtttactcatatatactttagattgatttaaaacttcatttttaatttaaaaggatctaggtgaagatcctttttgataatctcatgaccaaaatcccttaacgtgagttttcgttccactgagcgtcagaccccgtagaaaagatcaaaggatcttcttgagatcctttttttctgcgcgtaatctgctgcttgcaaacaaaaaaaccaccgctaccagcggtggtttgtttgccggatcaagagctaccaactctttttccgaaggtaactggcttcagcagagcgcagataccaaatactgttcttctagtgtagccgtagttaggccaccacttcaagaactctgtagcaccgcctacatacctcgctctgctaatcctgttaccagtggctgctgccagtggcgataagtcgtgtcttaccgggttggactcaagacgatagttaccggataaggcgcagcggtcgggctgaacggggggttcgtgcacacagcccagcttggagcgaacgacctacaccgaactgagatacctacagcgtgagctatgagaaagcgccacgcttcccgaagggagaaaggcggacaggtatccggtaagcggcagggtcggaacaggagagcgcacgagggagcttccagggggaaacgcctggtatctttatagtcctgtcgggtttcgccacctctgacttgagcgtcgatttttgtgatgctcgtcaggggggcggagcctatggaaaaacgccagcaacgcggcctttttacggttcctggccttttgctggccttttgctcacatgttctttcctgcgttatcccctgattctgtggataaccgtattaccgcctttgagtgagctgataccgctcgccgcagccgaacgaccgagcgcagcgagtcagtgagcgaggaagcggaagagcgcccaatacgcaaaccgcctctccccgcgcgttggccgattcattaatgcagctggcacgacaggtttcccgactggaaagcgggcagtgagcgcaacgcaattaatgtgagttagctcactcattaggcaccccaggctttacactttatgcttccggctcgtatgttgtgtggaattgtgagcggataacaatttcacacaggaaacagctatgaccatgattacgcctctagaaagctttaatacgactcactataaggactcactatttgttttcgcgcccagttgcaaaaagtgtcgacatttgcttctgacacaactgtgttcactagcaacctcaaacagacaccgccaccatgcctgctgctaagagagtgaaactggatggatccaccgg

SEQ ID NO: 192 - DNA, 10719 bp, synthetic construct
  misc_feature 1..10719: note = V74 DNA
  source 1..10719: mol_type = other DNA
tccagccaccatgaaccatgaccaggaatttgaccccccaaaggtttacccacctgtgccagctgagaagaggaagcccatccgcgtgctgtctctctttgatgggattgctacagggctcctggtgctgaaggacctgggcatccaagtggaccgctacattgcctccgaggtgtgtgaggactccatcacggtgggcatggtgcggcaccagggaaagatcatgtacgtcggggacgtccgcagcgtcacacagaagcatatccaggagtggggcccattcgacctggtgattggaggcagtccctgcaatgacctctccattgtcaaccctgcccgcaagggactttatgagggtactggccgcctcttctttgagttctaccgcctcctgcatgatgcgcggcccaaggagggagatgatcgccccttcttctggctctttgagaatgtggtggccatgggcgttagtgacaagagggacatctcgcgatttcttgagtctaaccccgtgatgattgacgccaaagaagtgtctgctgcacacagggcccgttacttctggggtaaccttcctggcatgaacaggcctttggcatccactgtgaatgataagctggagctgcaagagtgtctggagcacggcagaatagccaagttcagcaaagtgaggaccattaccaccaggtcaaactctataaagcagggcaaagaccagcatttccccgtcttcatgaacgagaaggaggacatcctgtggtgcactgaaatggaaagggtgtttggcttccccgtccactacacagacgtctccaacatgagccgcttggcgaggcagagactgctgggccgatcgtggagcgtgccggtcatccgccacctcttcgctccgctgaaggaatattttgcttgtgtgtctagcggcaatagtaacgctaacagccgcgggccgagcttcagcagcggcctggtgccgttaagcttgcgcggcagccatatgggccctatggagatatacaagacagtgtctgcatggaagagacagccagtgcgggtactgagcctcttcagaaacatcgacaaggtactaaagagtttgggcttcttggaaagcggttctggttctgggggaggaacgctgaagtacgtggaagatgtcacaaatgtcgtgaggagagacgtggagaaatggggcccctttgacctggtgtacggctcgacgcagcccctaggcagctcttgtgatcgctgtcccggctggtacatgttccagttccaccggatcctgcagtatgcgctgcctcgccaggagagtcagcggcccttcttctggatattcatggacaatctgctgctgactgaggatgaccaagagacaactacccgcttccttcagacagaggctgtgaccctccaggatgtccgtggcagagactaccagaatgctatgcgggtgtggagcaacattccagggctgaagagcaagcatgcgcccctgaccccaaaggaagaagagtatctgcaagcccaagtcagaagcaggagcaagctggacgccccgaaagttgacctcctggtgaagaactgccttctcccgctgagagagtacttcaagtatttttctcaaaactcacttcctcttggagggccgagctctggcgcacccccaccaagtggagggtctcctgccgggtccccaacatctactgaagaaggcaccagcgaatccgcaacgcccgagtcaggccctggtacctccacagaaccatctgaaggtagtgcgcctggttccccagctggaagccctacttccaccgaagaaggcacgtcaaccgaaccaagtgaaggatctgcccctgggaccagcactgaaccatctgagccaaaaaagaagagaaaggtaatggacaagaagtacagcatcggcctggccatcggcaccaactctgtgggctgggccgtgatcaccgacgagtacaaggtgcccagcaagaaattcaaggtgctgggcaacaccgaccggcacagcatcaagaagaacctgatcggcgccctgctgttcgacagcggagaaacagccgaggccacccggctgaagagaaccgccagaagaagatacaccagacggaagaaccggatctgctatctgcaagagatcttcagcaacgagatggccaaggtggacgacagcttcttccacagactggaagagtccttcctggtggaagaggataagaagcacgagcggcaccccatcttcggcaacatcgtggacgaggtggcctaccacgagaagtaccccaccatctaccacctgagaaagaaactggtggacagcaccgacaaggccgacctgcggctgatctatctggccctggcccacatgatcaagttccggggccacttcctgatcgagggcgacctgaaccccgacaacagcgacgtggacaagctgttcatccagctggtgcagacctacaaccagctgttcgaggaaaaccccatcaacgccagcggcgtggacgccaaggccatcctgtctgccagactgagcaagagcagacggctggaaaatctgatcgcccagctgcccggcgagaagaagaatggcctgttcggcaacctgattgccctgagcctgggcctgacccccaacttcaagagcaacttcgacctggccgaggatgccaaactgcagctgagcaaggacacctacgacgacgacctggacaacctgctggcccagatcggcgaccagtacgccgacctgtttctggccgccaagaacctgtccgacgccatcctgctgagcgacatcctgagagtgaacaccgagatcaccaaggcccccctgagcgcctctatgatcaagagatacgacgagcaccaccaggacctgaccctgctgaaagctctcgtgcggcagcagctgcctgagaagtacaaagagattttcttcgaccagagcaagaacggctacgccggctacatcgatggcggagccagccaggaagagttctacaagttcatcaagcccatcctggaaaagatggacggcaccgaggaactgctcgtgaagctgaacagagaggacctgctgcggaagcagcggaccttcgacaacggcagcatcccccaccagatccacctgggagagctgcacgccattctgcggcggcaggaagatttttacccattcctgaaggacaaccgggaaaagatcgagaagatcctgaccttccgcatcccctactacgtgggccctctggccaggggaaacagcagattcgcctggatgaccagaaagagcgaggaaaccatcaccccctggaacttcgaggaagtggtggacaagggcgccagcgcccagagcttcatcgagcggatgaccaacttcgataagaacctgcccaacgagaaggtgctgcccaagcacagcctgctgtacgagtacttcaccgtgtacaacgagctgaccaaagtgaaatacgtgaccgagggaatgagaaagcccgccttcctgagcggcgagcagaaaaaagccatcgtggacctgctgttcaagaccaaccggaaagtgaccgtgaagcagctgaaagaggactacttcaagaaaatcgagtgcttcgactccgtggaaatctccggcgtggaagatcggttcaacgcctccctgggcacataccacgatctgctgaaaattatcaaggacaaggacttcctggacaatgaggaaaacgaggacattctggaagatatcgtgctgaccctgacactgtttgaggacagagagatgatcgaggaacggctgaaaacctatgcccacctgttcgacgacaaagtgatgaagcagctgaagcggcggagatacaccggctggggcaggctgagccggaagctgatcaacggcatccgggacaagcagtccggcaagacaatcctggatttcctgaagtccgacggcttcgccaacagaaacttcatgcagctgatccacgacgacagcctgacctttaaagaggacatccagaaagcccaggtgtccggccagggcgatagcctgcacgagcacattgccaatctggccggcagccccgccattaagaagggcatcctgcagacagtgaaggtggtggacgagctcgtgaaagtgatgggccggcacaagcccgagaacatcgtgatcgaaatggccagagagaaccagaccacccagaagggacagaagaacagccgcgagagaatgaagcggatcgaagagggcatcaaagagctgggcagccagatcctgaaagaacaccccgtggaaaacacccagctgcagaacgagaagctgtacctgtactacctgcagaatgggcgggatatgtacgtggaccaggaactggacatcaaccggctgtccgactacgatgtggacgctatcgtgcctcagagctttctgaaggacgactccatcgataacaaagtgctgactcggagcgacaagaaccggggcaagagcgacaacgtgccctccgaagaggtcgtgaagaagatgaagaactactggcgccagctgctgaatgccaagctgattacccagaggaagttcgacaatctgaccaaggccgagagaggcggcctgagcgaactggataaggccggcttcatcaagagacagctggtggaaacccggcagatcacaaagcacgtggcacagatcctggactcccggatgaacactaagtacgacgagaacgacaaactgatccgggaagtgaaagtgatcaccctgaagtccaagctggtgtccgatttccggaaggatttccagttttacaaagtgcgcgagatcaacaactaccaccacgcccacgacgcctacctgaacgccgtcgtgggaaccgccctgatcaaaaagtaccctaagctggaaagcgagttcgtgtacggcgactacaaggtgtacgacgtgcggaagatgatcgccaagagcgagcaggaaatcggcaaggctaccgccaagtacttcttctacagcaacatcatgaactttttcaagaccgagattaccctggccaacggcgagatccggaagcggcctctgatcgagacaaacggcgaaacaggcgagatcgtgtgggataagggccgggactttgccaccgtgcggaaagtgctgtctatgccccaagtgaatatcgtgaaaaagaccgaggtgcagacaggcggcttcagcaaagagtctatcctgcccaagaggaacagcgacaagctgatcgccagaaagaaggactgggaccctaagaagtacggcggcttcgacagccccaccgtggcctattctgtgctggtggtggccaaagtggaaaagggcaagtccaagaaactgaagagtgtgaaagagctgctggggatcaccatcatggaaagaagcagcttcgagaagaatcccatcgactttctggaagccaagggctacaaagaagtgaaaaaggacctgatcatcaagctgcctaagtactccctgttcgagctggaaaacggccggaagagaatgctggcctctgccggcgaactgcagaagggaaacgaactggccctgccctccaaatatgtgaacttcctgtacctggccagccactatgagaagctgaagggctcccccgaggataatgagcagaaacagctgtttgtggaacagcacaaacactacctggacgagatcatcgagcagatcagcgagttctccaagagagtgatcctggccgacgctaatctggacaaggtgctgagcgcctacaacaagcacagagacaagcctatcagagagcaggccgagaatatcatccacctgtttaccctgaccaatctgggagcccctgccgccttcaagtactttgacaccaccatcgaccggaagaggtacaccagcaccaaagaggtgctggacgccaccctgatccaccagagcatcaccggcctgtacgagacacggatcgacctgtctcagctgggaggcgacgcctatccctatgacgtgcccgattatgccagcctgggcagcggctcccccaagaaaaaacgcaaggtggaagatcctaagaaaaagcggaaagtggacggcagcggcagcgagacccccggtaccagcgagagcgccacccccgagagccggacactcgagcctccacctaatgcctatgaactctttgccaagggctatgaagactatctgcagtccccgcttcagccactgatggacaatctggaatctcagacatatgaagtgtttgaaaaggaccccatcaaatactctcagtaccagcaggccatctataaatgtctgctagaccgagtaccagaagaggagaaggataccaatgtccaggtactgatggtgctgggagcaggacggggacccctggtgaacgcttccctgcgggcagccaagcaggccgaccggcggataaagctgtatgctgtggagaaaaacccaaatgccgtggtgacgctagagaactggcagtttgaagaatggggaagccaagtgaccgtagtctcatcagacatgagggaatgggtggctccagagaaagcagacatcattgtcagtgagcttctgggctcatttgctgacaatgaattgtcgcctgagtgcctggatggagcccagcacttcctaaaagatgatggtgtgagcatccccggggagtacacttcctttctggctcccatctcttcctccaagctgtacaatgaggtccgagcctgtagggagaaggaccgtgaccctgaggcccagtttgagatgccttatgtggtacggctgcacaacttccaccagctctctgcaccccagccctgtttcaccttcagccatcccaacagagatcctatgattgacaacaaccgctattgcaccttggaatttcctgtggaggtgaacacagtactacatggctttgccggctactttgagactgtgctttatcaggacatcactctgagtatccgtccagagactcactctcctgggatgttctcatggtttcccatcctcttccctattaagcagcccataacggtacgtgaaggccaaaccatctgtgtgcgtttctggcgatgcagcaattccaagaaggtgtggtatgagtgggctgtgacagcaccagtctgttctgctattcataaccccacaggccgctcatataccattggcctctgagatcccaagcacgcagcaatgcagctcaaaacgcttagcctagccacacccccacgggaaacagcagtgattaacctttagcaataaacgaaagtttaactaagctatactaaccccagggttggtcaatttcgtgccagccacaccctggtactgcatgcacgcaatgctagctgcccctttcccgtcctgggcaccccgagtctcccccgaccccgggtcccaggtatgctcccacctccacctgccccactcaccacctctgctagttccagacacctccgagacgaggaaaaaaaaaaaaaaaaaaaaaaaaaaaaaaaaaaaaaaaaaaaaaaaaaaaaaaaaaaaaaaaaaaaaaaaaaaaaaaaaaaaaaaaaaaaaaaaaaaaaaaaaaaaaaaaaaaaaaaaaaaaaaaaaaaaaaaaaaaaaaaaaaaaaaaaaaaaaaaaaaaaaaaaaaaaaaaaaaaaaaaaaaaaaaaaaaaaaaaaaaaaaaaaaaaaaaaaaaaaaaaaaaaaaaaaaaaaaaaaaaaaaaaaaaaaaaaaaaaaaaaaaaaaaaaaaaaaaaaaaaaaaaaaaaaaaaaaaaaaaaaaaaaaaaaaaaaaaaaaaaaaaaaaaaaaaaaaaaaaaaaaaaaaaaaaaaaaaaaaaaaaaaaaaaaaaaaaaaaaaaaaaaaaaaaaaaaccgtcttcaagctttctagaaattcactggccgtcgttttacaacgtcgtgactgggaaaaccctggcgttacccaacttaatcgccttgcagcacatccccctttcgccagctggcgtaatagcgaagaggcccgcaccgatcgcccttcccaacagttgcgcagcctgaatggcgaatggcgcctgatgcggtattttctccttacgcatctgtgcggtatttcacaccgcatatggtgcactctcagtacaatctgctctgatgccgcatagttaagccagccccgacacccgccaacacccgctgacgcgccctgacgggcttgtctgctcccggcatccgcttacagacaagctgtgaccgtctccgggagctgcatgtgtcagaggttttcaccgtcatcaccgaaacgcgcgagacgaaagggcctcgtgatacgcctatttttataggttaatgtcatgataataatggtttcttagacgtcaggtggcacttttcggggaaatgtgcgcggaacccctatttgtttatttttctaaatacattcaaatatgtatccgctcatgagacaataaccctgataaatgcttcaataatattgaaaaaggaagagtatgagtattcaacatttccgtgtcgcccttattcccttttttgcggcattttgccttcctgtttttgctcacccagaaacgctggtgaaagtaaaagatgctgaagatcagttgggtgcacgagtgggttacatcgaactggatctcaacagcggtaagatccttgagagttttcgccccgaagaacgttttccaatgatgagcacttttaaagttctgctatgtggcgcggtattatcccgtattgacgccgggcaagagcaactcggtcgccgcatacactattctcagaatgacttggttgagtactcaccagtcacagaaaagcatcttacggatggcatgacagtaagagaattatgcagtgctgccataaccatgagtgataacactgcggccaacttacttctgacaacgatcggaggaccgaaggagctaaccgcttttttgcacaacatgggggatcatgtaactcgccttgatcgttgggaaccggagctgaatgaagccataccaaacgacgagcgtgacaccacgatgcctgtagcaatggcaacaacgttgcgcaaactattaactggcgaactacttactctagcttcccggcaacaattaatagactggatggaggcggataaagttgcaggaccacttctgcgctcggcccttccggctggctggtttattgctgataaatctggagccggtgagcgtgggtctcgcggtatcattgcagcactggggccagatggtaagccctcccgtatcgtagttatctacacgacggggagtcaggcaactatggatgaacgaaatagacagatcgctgagataggtgcctcactgattaagcattggtaactgtcagaccaagtttactcatatatactttagattgatttaaaacttcatttttaatttaaaaggatctaggtgaagatcctttttgataatctcatgaccaaaatcccttaacgtgagttttcgttccactgagcgtcagaccccgtagaaaagatcaaaggatcttcttgagatcctttttttctgcgcgtaatctgctgcttgcaaacaaaaaaaccaccgctaccagcggtggtttgtttgccggatcaagagctaccaactctttttccgaaggtaactggcttcagcagagcgcagataccaaatactgttcttctagtgtagccgtagttaggccaccacttcaagaactctgtagcaccgcctacatacctcgctctgctaatcctgttaccagtggctgctgccagtggcgataagtcgtgtcttaccgggttggactcaagacgatagttaccggataaggcgcagcggtcgggctgaacggggggttcgtgcacacagcccagcttggagcgaacgacctacaccgaactgagatacctacagcgtgagctatgagaaagcgccacgcttcccgaagggagaaaggcggacaggtatccggtaagcggcagggtcggaacaggagagcgcacgagggagcttccagggggaaacgcctggtatctttatagtcctgtcgggtttcgccacctctgacttgagcgtcgatttttgtgatgctcgtcaggggggcggagcctatggaaaaacgccagcaacgcggcctttttacggttcctggccttttgctggccttttgctcacatgttctttcctgcgttatcccctgattctgtggataaccgtattaccgcctttgagtgagctgataccgctcgccgcagccgaacgaccgagcgcagcgagtcagtgagcgaggaagcggaagagcgcccaatacgcaaaccgcctctccccgcgcgttggccgattcattaatgcagctggcacgacaggtttcccgactggaaagcgggcagtgagcgcaacgcaattaatgtgagttagctcactcattaggcaccccaggctttacactttatgcttccggctcgtatgttgtgtggaattgtgagcggataacaatttcacacaggaaacagctatgaccatgattacgcctctagaaagctttaatacgactcactataaggactcactatttgttttcgcgcccagttgcaaaaagtgtcgacatttgcttctgacacaactgtgttcactagcaacctcaaacagacaccgccaccatgcctgctgctaagagagtgaaactggatggatccaccgg

SEQ ID NO: 193 - DNA, 17134 bp, synthetic construct
  misc_feature 1..17134: note = V75 DNA
  source 1..17134: mol_type = other DNA
acgcgtgtagtcttatgcaatactcttgtagtcttgcaacatggtaacgatgagttagcaacatgccttacaaggagagaaaaagcaccgtgcatgccgattggtggaagtaaggtggtacgatcgtgccttattaggaaggcaacagacgggtctgacatggattggacgaaccactgaattgccgcattgcagagatattgtatttaagtgcctagctcgatacaataaacgggtctctctggttagaccagatctgagcctgggagctctctggctaactagggaacccactgcttaagcctcaataaagcttgccttgagtgcttcaagtagtgtgtgcccgtctgttgtgtgactctggtaactagagatccctcagacccttttagtcagtgtggaaaatctctagcagtggcgcccgaacagggacctgaaagcgaaagggaaaccagagctctctcgacgcaggactcggcttgctgaagcgcgcacggcaagaggcgaggggcggcgactggtgagtacgccaaaaattttgactagcggaggctagaaggagagagatgggtgcgagagcgtcagtattaagcgggggagaattagatcgcgatgggaaaaaattcggttaaggccagggggaaagaaaaaatataaattaaaacatatagtatgggcaagcagggagctagaacgattcgcagttaatcctggcctgttagaaacatcagaaggctgtagacaaatactgggacagctacaaccatcccttcagacaggatcagaagaacttagatcattatataatacagtagcaaccctctattgtgtgcatcaaaggatagagataaaagacaccaaggaagctttagacaagatagaggaagagcaaaacaaaagtaagaccaccgcacagcaagcggccactgatcttcagacctggaggaggagatatgagggacaattggagaagtgaattatataaatataaagtagtaaaaattgaaccattaggagtagcacccaccaaggcaaagagaagagtggtgcagagagaaaaaagagcagtgggaataggagctttgttccttgggttcttgggagcagcaggaagcactatgggcgcagcctcaatgacgctgacggtacaggccagacaattattgtctggtatagtgcagcagcagaacaatttgctgagggctattgaggcgcaacagcatctgttgcaactcacagtctggggcatcaagcagctccaggcaagaatcctggctgtggaaagatacctaaaggatcaacagctcctggggatttggggttgctctggaaaactcatttgcaccactgctgtgccttggaatgctagttggagtaataaatctctggaacagattggaatcacacgacctggatggagtgggacagagaaattaacaattacacaagcttaatacactccttaattgaagaatcgcaaaaccagcaagaaaagaatgaacaagaattattggaattagataaatgggcaagtttgtggaattggtttaacataacaaattggctgtggtatataaaattattcataatgatagtaggaggcttggtaggtttaagaatagtttttgctgtactttctatagtgaatagagttaggcagggatattcaccattatcgtttcagacccacctcccaaccccgaggggacccgacaggcccgaaggaatagaagaagaaggtggagagagagacagagacagatccattcgattagtgaacggatctcgacggttaacttttaaaagaaaaggggggattggggggtacagtgcaggggaaagaatagtagacataatagcaacagacatacaaactaaagaattacaaaaacaaattacaaaaattcaaaattttatcgatactagtggcgcgccggattcgacattgattattgactagttattaatagtaatcaattacggggtcattagttcatagcccatatatggagttccgcgttacataacttacggtaaatggcccgcctggctgaccgcccaacgacccccgcccattgacgtcaataatgacgtatgttcccatagtaacgccaatagggactttccattgacgtcaatgggtggagtatttacggtaaactgcccacttggcagtacatcaagtgtatcatatgccaagtacgccccctattgacgtcaatgacggtaaatggcccgcctggcattatgcccagtacatgaccttatgggactttcctacttggcagtacatctacgtattagtcatcgctattaccatggtcgaggtgagccccacgttctgcttcactctccccatctcccccccctccccacccccaattttgtatttatttattttttaattattttgtgcagcgatgggggcggggggggggggggggcgcgcgccaggcggggcggggcggggcgaggggcggggcggggcgaggcggagaggtgcggcggcagccaatcagagcggcgcgctccgaaagtttccttttatggcgaggcggcggcggcggcggccctataaaaagcgaagcgcgcggcgggcgggagtcgctgcgttgccttcgccccgtgccccgctccgcgccgcctcgcgccgcccgccccggctctgactgaccgcgttactcccacaggtgagcgggcgggacggcccttctcctccgggctgtaattagcgcttggtttaatgacggctcgtttcttttctgtggctgcgtgaaagccttaaagggctccgggagggccctttgtgcgggggggagcggctcggggggtgcgtgcgtgtgtgtgtgcgtggggagcgccgcgtgcggcccgcgctgcccggcggctgtgagcgctgcgggcgcggcgcggggctttgtgcgctccgcgtgtgcgcgaggggagcgcggccgggggcggtgccccgcggtgcgggggggctgcgaggggaacaaaggctgcgtgcggggtgtgtgcgtgggggggtgagcagggggtgtgggcgcggcggtcgggctgtaacccccccctgcacccccctccccgagttgctgagcacggcccggcttcgggtgcggggctccgtgcggggcgtggcgcggggctcgccgtgccgggcggggggtggcggcaggtgggggtgccgggcggggcggggccgcctcgggccggggagggctcgggggaggggcgcggcggccccggagcgccggcggctgtcgaggcgcggcgagccgcagccattgccttttatggtaatcgtgcgagagggcgcagggacttcctttgtcccaaatctggcggagccgaaatctgggaggcgccgccgcaccccctctagcgggcgcgggcgaagcggtgcggcgccggcaggaaggaaatgggcggggagggccttcgtgcgtcgccgcgccgccgtccccttctccatctccagcctcggggctgccgcagggggacggctgccttcgggggggacggggcagggcggggttcggcttctggcgtgtgaccggcggctctagagcctctgctaaccatgttcatgccttcttctttttcctacagatccttaattaatctagaaccggtccagccaccatgaaccatgaccaggaatttgaccccccaaaggtttacccacctgtgccagctgagaagaggaagcccatccgcgtgctgtctctctttgatgggattgctacagggctcctggtgctgaaggacctgggcatccaagtggaccgctacattgcctccgaggtgtgtgaggactccatcacggtgggcatggtgcggcaccagggaaagatcatgtacgtcggggacgtccgcagcgtcacacagaagcatatccaggagtggggcccattcgacctggtgattggaggcagtccctgcaatgacctctccattgtcaaccctgcccgcaagggactttatgagggtactggccgcctcttctttgagttctaccgcctcctgcatgatgcgcggcccaaggagggagatgatcgccccttcttctggctctttgagaatgtggtggccatgggcgttagtgacaagagggacatctcgcgatttcttgagtctaaccccgtgatgattgacgccaaagaagtgtctgctgcacacagggcccgttacttctggggtaaccttcctggcatgaacaggcctttggcatccactgtgaatgataagctggagctgcaagagtgtctggagcacggcagaatagccaagttcagcaaagtgaggaccattaccaccaggtcaaactctataaagcagggcaaagaccagcatttccccgtcttcatgaacgagaaggaggacatcctgtggtgcactgaaatggaaagggtgtttggcttccccgtccactacacagacgtctccaacatgagccgcttggcgaggcagagactgctgggccgatcgtggagcgtgccggtcatccgccacctcttcgctccgctgaaggaatattttgcttgtgtgtctagcggcaatagtaacgctaacagccgcgggccgagcttcagcagcggcctggtgccgttaagcttgcgcggcagccatatgggccctatggagatatacaagacagtgtctgcatggaagagacagccagtgcgggtactgagcctcttcagaaacatcgacaaggtactaaagagtttgggcttcttggaaagcggttctggttctgggggaggaacgctgaagtacgtggaagatgtcacaaatgtcgtgaggagagacgtggagaaatggggcccctttgacctggtgtacggctcgacgcagcccctaggcagctcttgtgatcgctgtcccggctggtacatgttccagttccaccggatcctgcagtatgcgctgcctcgccaggagagtcagcggcccttcttctggatattcatggacaatctgctgctgactgaggatgaccaagagacaactacccgcttccttcagacagaggctgtgaccctccaggatgtccgtggcagagactaccagaatgctatgcgggtgtggagcaacattccagggctgaagagcaagcatgcgcccctgaccccaaaggaagaagagtatctgcaagcccaagtcagaagcaggagcaagctggacgccccgaaagttgacctcctggtgaagaactgccttctcccgctgagagagtacttcaagtatttttctcaaaactcacttcctcttggagggccgagctctggcgcacccccaccaagtggagggtctcctgccgggtccccaacatctactgaagaaggcaccagcgaatccgcaacgcccgagtcaggccctggtacctccacagaaccatctgaaggtagtgcgcctggttccccagctggaagccctacttccaccgaagaaggcacgtcaaccgaaccaagtgaaggatctgcccctgggaccagcactgaaccatctgagccaaaaaagaagagaaaggtaatggacaagaagtacagcatcggcctggccatcggcaccaactctgtgggctgggccgtgatcaccgacgagtacaaggtgcccagcaagaaattcaaggtgctgggcaacaccgaccggcacagcatcaagaagaacctgatcggcgccctgctgttcgacagcggagaaacagccgaggccacccggctgaagagaaccgccagaagaagatacaccagacggaagaaccggatctgctatctgcaagagatcttcagcaacgagatggccaaggtggacgacagcttcttccacagactggaagagtccttcctggtggaagaggataagaagcacgagcggcaccccatcttcggcaacatcgtggacgaggtggcctaccacgagaagtaccccaccatctaccacctgagaaagaaactggtggacagcaccgacaaggccgacctgcggctgatctatctggccctggcccacatgatcaagttccggggccacttcctgatcgagggcgacctgaaccccgacaacagcgacgtggacaagctgttcatccagctggtgcagacctacaaccagctgttcgaggaaaaccccatcaacgccagcggcgtggacgccaaggccatcctgtctgccagactgagcaagagcagacggctggaaaatctgatcgcccagctgcccggcgagaagaagaatggcctgttcggcaacctgattgccctgagcctgggcctgacccccaacttcaagagcaacttcgacctggccgaggatgccaaactgcagctgagcaaggacacctacgacgacgacctggacaacctgctggcccagatcggcgaccagtacgccgacctgtttctggccgccaagaacctgtccgacgccatcctgctgagcgacatcctgagagtgaacaccgagatcaccaaggcccccctgagcgcctctatgatcaagagatacgacgagcaccaccaggacctgaccctgctgaaagctctcgtgcggcagcagctgcctgagaagtacaaagagattttcttcgaccagagcaagaacggctacgccggctacatcgatggcggagccagccaggaagagttctacaagttcatcaagcccatcctggaaaagatggacggcaccgaggaactgctcgtgaagctgaacagagaggacctgctgcggaagcagcggaccttcgacaacggcagcatcccccaccagatccacctgggagagctgcacgccattctgcggcggcaggaagatttttacccattcctgaaggacaaccgggaaaagatcgagaagatcctgaccttccgcatcccctactacgtgggccctctggccaggggaaacagcagattcgcctggatgaccagaaagagcgaggaaaccatcaccccctggaacttcgaggaagtggtggacaagggcgccagcgcccagagcttcatcgagcggatgaccaacttcgataagaacctgcccaacgagaaggtgctgcccaagcacagcctgctgtacgagtacttcaccgtgtacaacgagctgaccaaagtgaaatacgtgaccgagggaatgagaaagcccgccttcctgagcggcgagcagaaaaaagccatcgtggacctgctgttcaagaccaaccggaaagtgaccgtgaagcagctgaaagaggactacttcaagaaaatcgagtgcttcgactccgtggaaatctccggcgtggaagatcggttcaacgcctccctgggcacataccacgatctgctgaaaattatcaaggacaaggacttcctggacaatgaggaaaacgaggacattctggaagatatcgtgctgaccctgacactgtttgaggacagagagatgatcgaggaacggctgaaaacctatgcccacctgttcgacgacaaagtgatgaagcagctgaagcggcggagatacaccggctggggcaggctgagccggaagctgatcaacggcatccgggacaagcagtccggcaagacaatcctggatttcctgaagtccgacggcttcgccaacagaaacttcatgcagctgatccacgacgacagcctgacctttaaagaggacatccagaaagcccaggtgtccggccagggcgatagcctgcacgagcacattgccaatctggccggcagccccgccattaagaagggcatcctgcagacagtgaaggtggtggacgagctcgtgaaagtgatgggccggcacaagcccgagaacatcgtgatcgaaatggccagagagaaccagaccacccagaagggacagaagaacagccgcgagagaatgaagcggatcgaagagggcatcaaagagctgggcagccagatcctgaaagaacaccccgtggaaaacacccagctgcagaacgagaagctgtacctgtactacctgcagaatgggcgggatatgtacgtggaccaggaactggacatcaaccggctgtccgactacgatgtggacgctatcgtgcctcagagctttctgaaggacgactccatcgataacaaagtgctgactcggagcgacaagaaccggggcaagagcgacaacgtgccctccgaagaggtcgtgaagaagatgaagaactactggcgccagctgctgaatgccaagctgattacccagaggaagttcgacaatctgaccaaggccgagagaggcggcctgagcgaactggataaggccggcttcatcaagagacagctggtggaaacccggcagatcacaaagcacgtggcacagatcctggactcccggatgaacactaagtacgacgagaacgacaaactgatccgggaagtgaaagtgatcaccctgaagtccaagctggtgtccgatttccggaaggatttccagttttacaaagtgcgcgagatcaacaactaccaccacgcccacgacgcctacctgaacgccgtcgtgggaaccgccctgatcaaaaagtaccctaagctggaaagcgagttcgtgtacggcgactacaaggtgtacgacgtgcggaagatgatcgccaagagcgagcaggaaatcggcaaggctaccgccaagtacttcttctacagcaacatcatgaactttttcaagaccgagattaccctggccaacggcgagatccggaagcggcctctgatcgagacaaacggcgaaacaggcgagatcgtgtgggataagggccgggactttgccaccgtgcggaaagtgctgtctatgccccaagtgaatatcgtgaaaaagaccgaggtgcagacaggcggcttcagcaaagagtctatcctgcccaagaggaacagcgacaagctgatcgccagaaagaaggactgggaccctaagaagtacggcggcttcgacagccccaccgtggcctattctgtgctggtggtggccaaagtggaaaagggcaagtccaagaaactgaagagtgtgaaagagctgctggggatcaccatcatggaaagaagcagcttcgagaagaatcccatcgactttctggaagccaagggctacaaagaagtgaaaaaggacctgatcatcaagctgcctaagtactccctgttcgagctggaaaacggccggaagagaatgctggcctctgccggcgaactgcagaagggaaacgaactggccctgccctccaaatatgtgaacttcctgtacctggccagccactatgagaagctgaagggctcccccgaggataatgagcagaaacagctgtttgtggaacagcacaaacactacctggacgagatcatcgagcagatcagcgagttctccaagagagtgatcctggccgacgctaatctggacaaggtgctgagcgcctacaacaagcacagagacaagcctatcagagagcaggccgagaatatcatccacctgtttaccctgaccaatctgggagcccctgccgccttcaagtactttgacaccaccatcgaccggaagaggtacaccagcaccaaagaggtgctggacgccaccctgatccaccagagcatcaccggcctgtacgagacacggatcgacctgtctcagctgggaggcgacgcctatccctatgacgtgcccgattatgccagcctgggcagcggctcccccaagaaaaaacgcaaggtggaagatcctaagaaaaagcggaaagtggacggcagcggcagcgagacccccggtaccagcgagagcgccacccccgagagccggacactcttatctgggaagaaggcggcagccgcggcggcggcggctgcagcggcagcaaccgggacggaggctggccctgggacagcaggcggctccgagaacgggtctgaggtggccgcgcagcccgcgggcctgtcgggcccagccgaggtcgggccgggggcggtgggggagcgcacaccccgcaagaaagagcctccgcgggcctcgccccccgggggcctggcggaaccgccggggtccgcagggcctcaggccggccctactgtcgtgcctgggtctgcgacccccatggaaactggaatagcagagactccggaggggcgtcggaccagccggcgcaagcgggcgaaggtagagtacagagagatggatgaaagcttggccaacctctcagaagatgagtattattcagaagaagagagaaatgccaaagcagagaaggaaaagaagcttcccccaccaccccctcaagccccacctgaggaagaaaatgaaagtgagcctgaagaaccatcggggcaagcaggaggacttcaagacgacagttctggagggtatggagacggccaagcatcaggtgtggagggcgcagctttccagagccgacttcctcatgaccggatgacttctcaagaagcagcctgttttccagatattatcagtggaccacaacagacccagaaggtttttcttttcattagaaaccgcacactgcagttgtggttggataatccaaagattcagctgacatttgaggctactctccaacaattagaagcaccttataacagtgatactgtgcttgtccaccgagttcacagttatttagagcgtcatggtcttatcaacttcggcatctataagaggataaaacccctaccaactaaaaagacaggaaaggtaattattataggctctggggtctcaggcttggcagcagctcgacagttacaaagttttggaatggatgtcacacttttggaagccagggatcgtgtgggtggacgagttgccacatttcgcaaaggaaactatgtagctgatcttggagccatggtggtaacaggtcttggagggaatcctatggctgtggtcagcaaacaagtaaatatggaactggccaagatcaagcaaaaatgcccactttatgaagccaacggacaagctgacactgtcaaggttcctaaagagaaagatgaaatggtagagcaagagtttaaccggttgctagaagctacatcttaccttagtcatcaactagacttcaatgtcctcaataataagcctgtgtcccttggccaggcattggaagttgtcattcagttacaagagaagcatgtcaaagatgagcagattgaacattggaagaagatagtgaaaactcaggaagaattgaaagaacttcttaataagatggtaaatttgaaagagaaaattaaagaactccatcagcaatacaaagaagcatctgaagtaaagccacccagagatattactgccgagttcttagtgaaaagcaaacacagggatctgaccgccctatgcaaggaatatgatgaattagctgaaacacaaggaaagctagaagaaaaacttcaggagttggaagcgaatcccccaagtgatgtatatctctcatcaagagacagacaaatacttgattggcattttgcaaatcttgaatttgctaatgccacacctctctcaactctctcccttaagcactgggatcaggatgatgactttgagttcactggcagccacctgacagtaaggaatggctactcgtgtgtgcctgtggctttagcagaaggcctagacattaaactgaatacagcagtgcgacaggttcgctacacggcttcaggatgtgaagtgatagctgtgaatacccgctccacgagtcaaacctttatttataaatgcgacgcagttctctgtacccttcccctgggtgtgctgaagcagcagccaccagccgttcagtttgtgccacctctccctgagtggaaaacatctgcagtccaaaggatgggatttggcaaccttaacaaggtggtgttgtgttttgatcgggtgttctgggatccaagtgtcaatttgttcgggcatgttggcagtacgactgccagcaggggtgagctcttcctcttctggaacctctataaagctccaatactgttggcactagtggcaggagaagctgctggtatcatggaaaacataagtgacgatgtgattgttggccgatgcctggccattctcaaagggatttttggtagcagtgcagtacctcagcccaaagaaactgtggtgtctcgttggcgtgctgatccctgggctcggggctcttattcctatgttgctgcaggatcatctggaaatgactatgatttaatggctcagccaatcactcctggcccctcgattccaggtgccccacagccgattccacgactcttctttgcgggagaacatacgatccgtaactacccagccacagtgcatggtgctctgctgagtgggctgcgagaagcgggaagaattgcagaccagtttttgggggccatgtatacgctgcctcgccaggccacaccaggtgttcctgcacagcagtccccaagcatggagggcagcggcgctactaacttcagcctgctgaagcaggctggagacgtggaggagaaccctggacctatgcatatgagcgagctgattaaggagaacatgcacatgaagctgtacatggagggcaccgtggacaaccatcacttcaagtgcacatccgagggcgaaggcaagccctacgagggcacccagaccatgagaatcaaggtggtcgagggcggccctctccccttcgccttcgacatcctggctactagcttcctctacggcagcaagaccttcatcaaccacacccagggcatccccgacttcttcaagcagtccttccctgagggcttcacatgggagagagtcaccacatacgaagacgggggcgtgctgaccgctacccaggacaccagcctccaggacggctgcctcatctacaacgtcaagatcagaggggtgaacttcacatccaacggccctgtgatgcagaagaaaacactcggctgggaggccttcaccgagacgctgtaccccgctgacggcggcctggaaggcagaaacgacatggccctgaagctcgtgggcgggagccatctgatcgcaaacatcaagaccacatatagatccaagaaacccgctaagaacctcaagatgcctggcgtctactatgtggactacagactggaaagaatcaaggaggccaacaacgagacctacgtcgagcagcacgaggtggcagtggccagatactgcgacctccctagcaaactggggcacaagcttaattaagctagcaaacccgctgatcagcgtcgacaatcaacctctggattacaaaatttgtgaaagattgactggtattcttaactatgttgctccttttacgctatgtggatacgctgctttaatgcctttgtatcatgctattgcttcccgtatggctttcattttctcctccttgtataaatcctggttgctgtctctttatgaggagttgtggcccgttgtcaggcaacgtggcgtggtgtgcactgtgtttgctgacgcaacccccactggttggggcattgccaccacctgtcagctcctttccgggactttcgctttccccctccctattgccacggcggaactcatcgccgcctgccttgcccgctgctggacaggggctcggctgttgggcactgacaattccgtggtgttgtcggggaaatcatcgtcctttccttggctgctcgcctgtgttgccacctggattctgcgcgggacgtccttctgctacgtcccttcggccctcaatccagcggaccttccttcccgcggcctgctgccggctctgcggcctcttccgcgtcttcgccttcgccctcagacgagtcggatctccctttgggccgcctccccgcctggtacctttaagaccaatgacttacaaggcagctgtagatcttagccactttttaaaagaaaaggggggactggaagggctaattcactcccaacgaaaataagatctgctttttgcttgtactgggtctctctggttagaccagatctgagcctgggagctctctggctaactagggaacccactgcttaagcctcaataaagcttgccttgagtgcttcaagtagtgtgtgcccgtctgttgtgtgactctggtaactagagatccctcagacccttttagtcagtgtggaaaatctctagcagtagtagttcatgtcatcttattattcagtatttataacttgcaaagaaatgaatatcagagagtgagaggaacttgtttattgcagcttataatggttacaaataaagcaatagcatcacaaatttcacaaataaagcatttttttcactgcattctagttgtggtttgtccaaactcatcaatgtatcttatcatgtctggctctagctatcccgcccctaactccgcccagttccgcccattctccgccccatggctgactaattttttttatttatgcagaggccgaggccgcctcggcctctgagctattccagaagtagtgaggaggcttttttggaggcctagacttttgcagagacggcccaaattcgtaatcatggtcatagctgtttcctgtgtgaaattgttatccgctcacaattccacacaacatacgagccggaagcataaagtgtaaagcctggggtgcctaatgagtgagctaactcacattaattgcgttgcgctcactgcccgctttccagtcgggaaacctgtcgtgccagctgcattaatgaatcggccaacgcgcggggagaggcggtttgcgtattgggcgctcttccgcttcctcgctcactgactcgctgcgctcggtcgttcggctgcggcgagcggtatcagctcactcaaaggcggtaatacggttatccacagaatcaggggataacgcaggaaagaacatgtgagcaaaaggccagcaaaaggccaggaaccgtaaaaaggccgcgttgctggcgtttttccataggctccgcccccctgacgagcatcacaaaaatcgacgctcaagtcagaggtggcgaaacccgacaggactataaagataccaggcgtttccccctggaagctccctcgtgcgctctcctgttccgaccctgccgcttaccggatacctgtccgcctttctcccttcgggaagcgtggcgctttctcatagctcacgctgtaggtatctcagttcggtgtaggtcgttcgctccaagctgggctgtgtgcacgaaccccccgttcagcccgaccgctgcgccttatccggtaactatcgtcttgagtccaacccggtaagacacgacttatcgccactggcagcagccactggtaacaggattagcagagcgaggtatgtaggcggtgctacagagttcttgaagtggtggcctaactacggctacactagaaggacagtatttggtatctgcgctctgctgaagccagttaccttcggaaaaagagttggtagctcttgatccggcaaacaaaccaccgctggtagcggtggtttttttgtttgcaagcagcagattacgcgcagaaaaaaaggatctcaagaagatcctttgatcttttctacggggtctgacgctcagtggaacgaaaactcacgttaagggattttggtcatgagattatcaaaaaggatcttcacctagatccttttaaattaaaaatgaagttttaaatcaatctaaagtatatatgagtaaacttggtctgacagttaccaatgcttaatcagtgaggcacctatctcagcgatctgtctatttcgttcatccatagttgcctgactccccgtcgtgtagataactacgatacgggagggcttaccatctggccccagtgctgcaatgataccgcgagacccacgctcaccggctccagatttatcagcaataaaccagccagccggaagggccgagcgcagaagtggtcctgcaactttatccgcctccatccagtctattaattgttgccgggaagctagagtaagtagttcgccagttaatagtttgcgcaacgttgttgccattgctacaggcatcgtggtgtcacgctcgtcgtttggtatggcttcattcagctccggttcccaacgatcaaggcgagttacatgatcccccatgttgtgcaaaaaagcggttagctccttcggtcctccgatcgttgtcagaagtaagttggccgcagtgttatcactcatggttatggcagcactgcataattctcttactgtcatgccatccgtaagatgcttttctgtgactggtgagtactcaaccaagtcattctgagaatagtgtatgcggcgaccgagttgctcttgcccggcgtcaatacgggataataccgcgccacatagcagaactttaaaagtgctcatcattggaaaacgttcttcggggcgaaaactctcaaggatcttaccgctgttgagatccagttcgatgtaacccactcgtgcacccaactgatcttcagcatcttttactttcaccagcgtttctgggtgagcaaaaacaggaaggcaaaatgccgcaaaaaagggaataagggcgacacggaaatgttgaatactcatactcttcctttttcaatattattgaagcatttatcagggttattgtctcatgagcggatacatatttgaatgtatttagaaaaataaacaaataggggttccgcgcacatttccccgaaaagtgccacctgacgtctaagaaaccattattatcatgacattaacctataaaaataggcgtatcacgaggccctttcgtctcgcgcgtttcggtgatgacggtgaaaacctctgacacatgcagctcccggagacggtcacagcttgtctgtaagcggatgccgggagcagacaagcccgtcagggcgcgtcagcgggtgttggcgggtgtcggggctggcttaactatgcggcatcagagcagattgtactgagagtgcaccatatgcggtgtgaaataccgcacagatgcgtaaggagaaaataccgcatcaggcgccattcgccattcaggctgcgcaactgttgggaagggcgatcggtgcgggcctcttcgctattacgccagctggcgaaagggggatgtgctgcaaggcgattaagttgggtaacgccagggttttcccagtcacgacgttgtaaaacgacggccagtgccaagctg

SEQ ID NO: 194 - DNA, 6465 bp, synthetic construct
  misc_feature 1..6465: note = V7 CDS
  source 1..6465: mol_type = other DNA
atgaaccatgaccaggaatttgaccccccaaaggtttacccacctgtgccagctgagaagaggaagcccatccgcgtgctgtctctctttgatgggattgctacagggctcctggtgctgaaggacctgggcatccaagtggaccgctacattgcctccgaggtgtgtgaggactccatcacggtgggcatggtgcggcaccagggaaagatcatgtacgtcggggacgtccgcagcgtcacacagaagcatatccaggagtggggcccattcgacctggtgattggaggcagtccctgcaatgacctctccattgtcaaccctgcccgcaagggactttatgagggtactggccgcctcttctttgagttctaccgcctcctgcatgatgcgcggcccaaggagggagatgatcgccccttcttctggctctttgagaatgtggtggccatgggcgttagtgacaagagggacatctcgcgatttcttgagtctaaccccgtgatgattgacgccaaagaagtgtctgctgcacacagggcccgttacttctggggtaaccttcctggcatgaacaggcctttggcatccactgtgaatgataagctggagctgcaagagtgtctggagcacggcagaatagccaagttcagcaaagtgaggaccattaccaccaggtcaaactctataaagcagggcaaagaccagcatttccccgtcttcatgaacgagaaggaggacatcctgtggtgcactgaaatggaaagggtgtttggcttccccgtccactacacagacgtctccaacatgagccgcttggcgaggcagagactgctgggccgatcgtggagcgtgccggtcatccgccacctcttcgctccgctgaaggaatattttgcttgtgtgtctagcggcaatagtaacgctaacagccgcgggccgagcttcagcagcggcctggtgccgttaagcttgcgcggcagccatatgggccctatggagatatacaagacagtgtctgcatggaagagacagccagtgcgggtactgagcctcttcagaaacatcgacaaggtactaaagagtttgggcttcttggaaagcggttctggttctgggggaggaacgctgaagtacgtggaagatgtcacaaatgtcgtgaggagagacgtggagaaatggggcccctttgacctggtgtacggctcgacgcagcccctaggcagctcttgtgatcgctgtcccggctggtacatgttccagttccaccggatcctgcagtatgcgctgcctcgccaggagagtcagcggcccttcttctggatattcatggacaatctgctgctgactgaggatgaccaagagacaactacccgcttccttcagacagaggctgtgaccctccaggatgtccgtggcagagactaccagaatgctatgcgggtgtggagcaacattccagggctgaagagcaagcatgcgcccctgaccccaaaggaagaagagtatctgcaagcccaagtcagaagcaggagcaagctggacgccccgaaagttgacctcctggtgaagaactgccttctcccgctgagagagtacttcaagtatttttctcaaaactcacttcctcttgacggcagcggcagcgagacccccggtaccagcgagagcgccacccccgagagcatgaacaattcccagggaagagtgaccttcgaggatgtcactgtgaacttcacccagggggagtggcagcggctgaatcccgaacagagaaacttgtacagggatgtgatgctggagaattacagcaaccttgtctctgtgggacaaggggaaaccaccaaacccgatgtgatcttgaggttggaacaaggaaaggagccatggttggaggaagaggaagtgctgggaagtggccgtgcagaaaaaaatggggacattggagggcagatttggaagccaaaggatgtgaaagagagtctcggagggccgagctctggcgcacccccaccaagtggagggtctcctgccgggtccccaacatctactgaagaaggcaccagcgaatccgcaacgcccgagtcaggccctggtacctccacagaaccatctgaaggtagtgcgcctggttccccagctggaagccctacttccaccgaagaaggcacgtcaaccgaaccaagtgaaggatctgcccctgggaccagcactgaaccatctgagccaaaaaagaagagaaaggtaatggacaagaagtacagcatcggcctggccatcggcaccaactctgtgggctgggccgtgatcaccgacgagtacaaggtgcccagcaagaaattcaaggtgctgggcaacaccgaccggcacagcatcaagaagaacctgatcggcgccctgctgttcgacagcggagaaacagccgaggccacccggctgaagagaaccgccagaagaagatacaccagacggaagaaccggatctgctatctgcaagagatcttcagcaacgagatggccaaggtggacgacagcttcttccacagactggaagagtccttcctggtggaagaggataagaagcacgagcggcaccccatcttcggcaacatcgtggacgaggtggcctaccacgagaagtaccccaccatctaccacctgagaaagaaactggtggacagcaccgacaaggccgacctgcggctgatctatctggccctggcccacatgatcaagttccggggccacttcctgatcgagggcgacctgaaccccgacaacagcgacgtggacaagctgttcatccagctggtgcagacctacaaccagctgttcgaggaaaaccccatcaacgccagcggcgtggacgccaaggccatcctgtctgccagactgagcaagagcagacggctggaaaatctgatcgcccagctgcccggcgagaagaagaatggcctgttcggcaacctgattgccctgagcctgggcctgacccccaacttcaagagcaacttcgacctggccgaggatgccaaactgcagctgagcaaggacacctacgacgacgacctggacaacctgctggcccagatcggcgaccagtacgccgacctgtttctggccgccaagaacctgtccgacgccatcctgctgagcgacatcctgagagtgaacaccgagatcaccaaggcccccctgagcgcctctatgatcaagagatacgacgagcaccaccaggacctgaccctgctgaaagctctcgtgcggcagcagctgcctgagaagtacaaagagattttcttcgaccagagcaagaacggctacgccggctacatcgatggcggagccagccaggaagagttctacaagttcatcaagcccatcctggaaaagatggacggcaccgaggaactgctcgtgaagctgaacagagaggacctgctgcggaagcagcggaccttcgacaacggcagcatcccccaccagatccacctgggagagctgcacgccattctgcggcggcaggaagatttttacccattcctgaaggacaaccgggaaaagatcgagaagatcctgaccttccgcatcccctactacgtgggccctctggccaggggaaacagcagattcgcctggatgaccagaaagagcgaggaaaccatcaccccctggaacttcgaggaagtggtggacaagggcgccagcgcccagagcttcatcgagcggatgaccaacttcgataagaacctgcccaacgagaaggtgctgcccaagcacagcctgctgtacgagtacttcaccgtgtacaacgagctgaccaaagtgaaatacgtgaccgagggaatgagaaagcccgccttcctgagcggcgagcagaaaaaagccatcgtggacctgctgttcaagaccaaccggaaagtgaccgtgaagcagctgaaagaggactacttcaagaaaatcgagtgcttcgactccgtggaaatctccggcgtggaagatcggttcaacgcctccctgggcacataccacgatctgctgaaaattatcaaggacaaggacttcctggacaatgaggaaaacgaggacattctggaagatatcgtgctgaccctgacactgtttgaggacagagagatgatcgaggaacggctgaaaacctatgcccacctgttcgacgacaaagtgatgaagcagctgaagcggcggagatacaccggctggggcaggctgagccggaagctgatcaacggcatccgggacaagcagtccggcaagacaatcctggatttcctgaagtccgacggcttcgccaacagaaacttcatgcagctgatccacgacgacagcctgacctttaaagaggacatccagaaagcccaggtgtccggccagggcgatagcctgcacgagcacattgccaatctggccggcagccccgccattaagaagggcatcctgcagacagtgaaggtggtggacgagctcgtgaaagtgatgggccggcacaagcccgagaacatcgtgatcgaaatggccagagagaaccagaccacccagaagggacagaagaacagccgcgagagaatgaagcggatcgaagagggcatcaaagagctgggcagccagatcctgaaagaacaccccgtggaaaacacccagctgcagaacgagaagctgtacctgtactacctgcagaatgggcgggatatgtacgtggaccaggaactggacatcaaccggctgtccgactacgatgtggacgctatcgtgcctcagagctttctgaaggacgactccatcgataacaaagtgctgactcggagcgacaagaaccggggcaagagcgacaacgtgccctccgaagaggtcgtgaagaagatgaagaactactggcgccagctgctgaatgccaagctgattacccagaggaagttcgacaatctgaccaaggccgagagaggcggcctgagcgaactggataaggccggcttcatcaagagacagctggtggaaacccggcagatcacaaagcacgtggcacagatcctggactcccggatgaacactaagtacgacgagaacgacaaactgatccgggaagtgaaagtgatcaccctgaagtccaagctggtgtccgatttccggaaggatttccagttttacaaagtgcgcgagatcaacaactaccaccacgcccacgacgcctacctgaacgccgtcgtgggaaccgccctgatcaaaaagtaccctaagctggaaagcgagttcgtgtacggcgactacaaggtgtacgacgtgcggaagatgatcgccaagagcgagcaggaaatcggcaaggctaccgccaagtacttcttctacagcaacatcatgaactttttcaagaccgagattaccctggccaacggcgagatccggaagcggcctctgatcgagacaaacggcgaaacaggcgagatcgtgtgggataagggccgggactttgccaccgtgcggaaagtgctgtctatgccccaagtgaatatcgtgaaaaagaccgaggtgcagacaggcggcttcagcaaagagtctatcctgcccaagaggaacagcgacaagctgatcgccagaaagaaggactgggaccctaagaagtacggcggcttcgacagccccaccgtggcctattctgtgctggtggtggccaaagtggaaaagggcaagtccaagaaactgaagagtgtgaaagagctgctggggatcaccatcatggaaagaagcagcttcgagaagaatcccatcgactttctggaagccaagggctacaaagaagtgaaaaaggacctgatcatcaagctgcctaagtactccctgttcgagctggaaaacggccggaagagaatgctggcctctgccggcgaactgcagaagggaaacgaactggccctgccctccaaatatgtgaacttcctgtacctggccagccactatgagaagctgaagggctcccccgaggataatgagcagaaacagctgtttgtggaacagcacaaacactacctggacgagatcatcgagcagatcagcgagttctccaagagagtgatcctggccgacgctaatctggacaaggtgctgagcgcctacaacaagcacagagacaagcctatcagagagcaggccgagaatatcatccacctgtttaccctgaccaatctgggagcccctgccgccttcaagtactttgacaccaccatcgaccggaagaggtacaccagcaccaaagaggtgctggacgccaccctgatccaccagagcatcaccggcctgtacgagacacggatcgacctgtctcagctgggaggcgacgcctatccctatgacgtgcccgattatgccagcctgggcagcggctcccccaagaaaaaacgcaaggtggaagatcctaagaaaaagcggaaagtggacggcctcgagtaatga

SEQ ID NO: 195 - DNA, 6459 bp, synthetic construct
  misc_feature 1..6459: note = V8 CDS
  source 1..6459: mol_type = other DNA
atgaacaattcccagggaagagtgaccttcgaggatgtcactgtgaacttcacccagggggagtggcagcggctgaatcccgaacagagaaacttgtacagggatgtgatgctggagaattacagcaaccttgtctctgtgggacaaggggaaaccaccaaacccgatgtgatcttgaggttggaacaaggaaaggagccatggttggaggaagaggaagtgctgggaagtggccgtgcagaaaaaaatggggacattggagggcagatttggaagccaaaggatgtgaaagagagtctcagcggcagcgagacccccggtaccagcgagagcgccacccccgagagcatgaaccatgaccaggaatttgaccccccaaaggtttacccacctgtgccagctgagaagaggaagcccatccgcgtgctgtctctctttgatgggattgctacagggctcctggtgctgaaggacctgggcatccaagtggaccgctacattgcctccgaggtgtgtgaggactccatcacggtgggcatggtgcggcaccagggaaagatcatgtacgtcggggacgtccgcagcgtcacacagaagcatatccaggagtggggcccattcgacctggtgattggaggcagtccctgcaatgacctctccattgtcaaccctgcccgcaagggactttatgagggtactggccgcctcttctttgagttctaccgcctcctgcatgatgcgcggcccaaggagggagatgatcgccccttcttctggctctttgagaatgtggtggccatgggcgttagtgacaagagggacatctcgcgatttcttgagtctaaccccgtgatgattgacgccaaagaagtgtctgctgcacacagggcccgttacttctggggtaaccttcctggcatgaacaggcctttggcatccactgtgaatgataagctggagctgcaagagtgtctggagcacggcagaatagccaagttcagcaaagtgaggaccattaccaccaggtcaaactctataaagcagggcaaagaccagcatttccccgtcttcatgaacgagaaggaggacatcctgtggtgcactgaaatggaaagggtgtttggcttccccgtccactacacagacgtctccaacatgagccgcttggcgaggcagagactgctgggccgatcgtggagcgtgccggtcatccgccacctcttcgctccgctgaaggaatattttgcttgtgtgtctagcggcaatagtaacgctaacagccgcgggccgagcttcagcagcggcctggtgccgttaagcttgcgcggcagccatatgggccctatggagatatacaagacagtgtctgcatggaagagacagccagtgcgggtactgagcctcttcagaaacatcgacaaggtactaaagagtttgggcttcttggaaagcggttctggttctgggggaggaacgctgaagtacgtggaagatgtcacaaatgtcgtgaggagagacgtggagaaatggggcccctttgacctggtgtacggctcgacgcagcccctaggcagctcttgtgatcgctgtcccggctggtacatgttccagttccaccggatcctgcagtatgcgctgcctcgccaggagagtcagcggcccttcttctggatattcatggacaatctgctgctgactgaggatgaccaagagacaactacccgcttccttcagacagaggctgtgaccctccaggatgtccgtggcagagactaccagaatgctatgcgggtgtggagcaacattccagggctgaagagcaagcatgcgcccctgaccccaaaggaagaagagtatctgcaagcccaagtcagaagcaggagcaagctggacgccccgaaagttgacctcctggtgaagaactgccttctcccgctgagagagtacttcaagtatttttctcaaaactcacttcctcttggagggccgagctctggcgcacccccaccaagtggagggtctcctgccgggtccccaacatctactgaagaaggcaccagcgaatccgcaacgcccgagtcaggccctggtacctccacagaaccatctgaaggtagtgcgcctggttccccagctggaagccctacttccaccgaagaaggcacgtcaaccgaaccaagtgaaggatctgcccctgggaccagcactgaaccatctgagccaaaaaagaagagaaaggtaatggacaagaagtacagcatcggcctggccatcggcaccaactctgtgggctgggccgtgatcaccgacgagtacaaggtgcccagcaagaaattcaaggtgctgggcaacaccgaccggcacagcatcaagaagaacctgatcggcgccctgctgttcgacagcggagaaacagccgaggccacccggctgaagagaaccgccagaagaagatacaccagacggaagaaccggatctgctatctgcaagagatcttcagcaacgagatggccaaggtggacgacagcttcttccacagactggaagagtccttcctggtggaagaggataagaagcacgagcggcaccccatcttcggcaacatcgtggacgaggtggcctaccacgagaagtaccccaccatctaccacctgagaaagaaactggtggacagcaccgacaaggccgacctgcggctgatctatctggccctggcccacatgatcaagttccggggccacttcctgatcgagggcgacctgaaccccgacaacagcgacgtggacaagctgttcatccagctggtgcagacctacaaccagctgttcgaggaaaaccccatcaacgccagcggcgtggacgccaaggccatcctgtctgccagactgagcaagagcagacggctggaaaatctgatcgcccagctgcccggcgagaagaagaatggcctgttcggcaacctgattgccctgagcctgggcctgacccccaacttcaagagcaacttcgacctggccgaggatgccaaactgcagctgagcaaggacacctacgacgacgacctggacaacctgctggcccagatcggcgaccagtacgccgacctgtttctggccgccaagaacctgtccgacgccatcctgctgagcgacatcctgagagtgaacaccgagatcaccaaggcccccctgagcgcctctatgatcaagagatacgacgagcaccaccaggacctgaccctgctgaaagctctcgtgcggcagcagctgcctgagaagtacaaagagattttcttcgaccagagcaagaacggctacgccggctacatcgatggcggagccagccaggaagagttctacaagttcatcaagcccatcctggaaaagatggacggcaccgaggaactgctcgtgaagctgaacagagaggacctgctgcggaagcagcggaccttcgacaacggcagcatcccccaccagatccacctgggagagctgcacgccattctgcggcggcaggaagatttttacccattcctgaaggacaaccgggaaaagatcgagaagatcctgaccttccgcatcccctactacgtgggccctctggccaggggaaacagcagattcgcctggatgaccagaaagagcgaggaaaccatcaccccctggaacttcgaggaagtggtggacaagggcgccagcgcccagagcttcatcgagcggatgaccaacttcgataagaacctgcccaacgagaaggtgctgcccaagcacagcctgctgtacgagtacttcaccgtgtacaacgagctgaccaaagtgaaatacgtgaccgagggaatgagaaagcccgccttcctgagcggcgagcagaaaaaagccatcgtggacctgctgttcaagaccaaccggaaagtgaccgtgaagcagctgaaagaggactacttcaagaaaatcgagtgcttcgactccgtggaaatctccggcgtggaagatcggttcaacgcctccctgggcacataccacgatctgctgaaaattatcaaggacaaggacttcctggacaatgaggaaaacgaggacattctggaagatatcgtgctgaccctgacactgtttgaggacagagagatgatcgaggaacggctgaaaacctatgcccacctgttcgacgacaaagtgatgaagcagctgaagcggcggagatacaccggctggggcaggctgagccggaagctgatcaacggcatccgggacaagcagtccggcaagacaatcctggatttcctgaagtccgacggcttcgccaacagaaacttcatgcagctgatccacgacgacagcctgacctttaaagaggacatccagaaagcccaggtgtccggccagggcgatagcctgcacgagcacattgccaatctggccggcagccccgccattaagaagggcatcctgcagacagtgaaggtggtggacgagctcgtgaaagtgatgggccggcacaagcccgagaacatcgtgatcgaaatggccagagagaaccagaccacccagaagggacagaagaacagccgcgagagaatgaagcggatcgaagagggcatcaaagagctgggcagccagatcctgaaagaacaccccgtggaaaacacccagctgcagaacgagaagctgtacctgtactacctgcagaatgggcgggatatgtacgtggaccaggaactggacatcaaccggctgtccgactacgatgtggacgctatcgtgcctcagagctttctgaaggacgactccatcgataacaaagtgctgactcggagcgacaagaaccggggcaagagcgacaacgtgccctccgaagaggtcgtgaagaagatgaagaactactggcgccagctgctgaatgccaagctgattacccagaggaagttcgacaatctgaccaaggccgagagaggcggcctgagcgaactggataaggccggcttcatcaagagacagctggtggaaacccggcagatcacaaagcacgtggcacagatcctggactcccggatgaacactaagtacgacgagaacgacaaactgatccgggaagtgaaagtgatcaccctgaagtccaagctggtgtccgatttccggaaggatttccagttttacaaagtgcgcgagatcaacaactaccaccacgcccacgacgcctacctgaacgccgtcgtgggaaccgccctgatcaaaaagtaccctaagctggaaagcgagttcgtgtacggcgactacaaggtgtacgacgtgcggaagatgatcgccaagagcgagcaggaaatcggcaaggctaccgccaagtacttcttctacagcaacatcatgaactttttcaagaccgagattaccctggccaacggcgagatccggaagcggcctctgatcgagacaaacggcgaaacaggcgagatcgtgtgggataagggccgggactttgccaccgtgcggaaagtgctgtctatgccccaagtgaatatcgtgaaaaagaccgaggtgcagacaggcggcttcagcaaagagtctatcctgcccaagaggaacagcgacaagctgatcgccagaaagaaggactgggaccctaagaagtacggcggcttcgacagccccaccgtggcctattctgtgctggtggtggccaaagtggaaaagggcaagtccaagaaactgaagagtgtgaaagagctgctggggatcaccatcatggaaagaagcagcttcgagaagaatcccatcgactttctggaagccaagggctacaaagaagtgaaaaaggacctgatcatcaagctgcctaagtactccctgttcgagctggaaaacggccggaagagaatgctggcctctgccggcgaactgcagaagggaaacgaactggccctgccctccaaatatgtgaacttcctgtacctggccagccactatgagaagctgaagggctcccccgaggataatgagcagaaacagctgtttgtggaacagcacaaacactacctggacgagatcatcgagcagatcagcgagttctccaagagagtgatcctggccgacgctaatctggacaaggtgctgagcgcctacaacaagcacagagacaagcctatcagagagcaggccgagaatatcatccacctgtttaccctgaccaatctgggagcccctgccgccttcaagtactttgacaccaccatcgaccggaagaggtacaccagcaccaaagaggtgctggacgccaccctgatccaccagagcatcaccggcctgtacgagacacggatcgacctgtctcagctgggaggcgacgcctatccctatgacgtgcccgattatgccagcctgggcagcggctcccccaagaaaaaacgcaaggtggaagatcctaagaaaaagcggaaagtggacggcctcgagtaatga

SEQ ID NO: 196 - DNA, 6484 bp, synthetic construct
  misc_feature 1..6484: note = V9 CDS
  source 1..6484: mol_type = other DNA
atggtccctgctgctaagagagtgaaactggatggatccgacaagaagtacagcatcggcctggccatcggcaccaactctgtgggctgggccgtgatcaccgacgagtacaaggtgcccagcaagaaattcaaggtgctgggcaacaccgaccggcacagcatcaagaagaacctgatcggcgccctgctgttcgacagcggagaaacagccgaggccacccggctgaagagaaccgccagaagaagatacaccagacggaagaaccggatctgctatctgcaagagatcttcagcaacgagatggccaaggtggacgacagcttcttccacagactggaagagtccttcctggtggaagaggataagaagcacgagcggcaccccatcttcggcaacatcgtggacgaggtggcctaccacgagaagtaccccaccatctaccacctgagaaagaaactggtggacagcaccgacaaggccgacctgcggctgatctatctggccctggcccacatgatcaagttccggggccacttcctgatcgagggcgacctgaaccccgacaacagcgacgtggacaagctgttcatccagctggtgcagacctacaaccagctgttcgaggaaaaccccatcaacgccagcggcgtggacgccaaggccatcctgtctgccagactgagcaagagcagacggctggaaaatctgatcgcccagctgcccggcgagaagaagaatggcctgttcggcaacctgattgccctgagcctgggcctgacccccaacttcaagagcaacttcgacctggccgaggatgccaaactgcagctgagcaaggacacctacgacgacgacctggacaacctgctggcccagatcggcgaccagtacgccgacctgtttctggccgccaagaacctgtccgacgccatcctgctgagcgacatcctgagagtgaacaccgagatcaccaaggcccccctgagcgcctctatgatcaagagatacgacgagcaccaccaggacctgaccctgctgaaagctctcgtgcggcagcagctgcctgagaagtacaaagagattttcttcgaccagagcaagaacggctacgccggctacatcgatggcggagccagccaggaagagttctacaagttcatcaagcccatcctggaaaagatggacggcaccgaggaactgctcgtgaagctgaacagagaggacctgctgcggaagcagcggaccttcgacaacggcagcatcccccaccagatccacctgggagagctgcacgccattctgcggcggcaggaagatttttacccattcctgaaggacaaccgggaaaagatcgagaagatcctgaccttccgcatcccctactacgtgggccctctggccaggggaaacagcagattcgcctggatgaccagaaagagcgaggaaaccatcaccccctggaacttcgaggaagtggtggacaagggcgccagcgcccagagcttcatcgagcggatgaccaacttcgataagaacctgcccaacgagaaggtgctgcccaagcacagcctgctgtacgagtacttcaccgtgtacaacgagctgaccaaagtgaaatacgtgaccgagggaatgagaaagcccgccttcctgagcggcgagcagaaaaaagccatcgtggacctgctgttcaagaccaaccggaaagtgaccgtgaagcagctgaaagaggactacttcaagaaaatcgagtgcttcgactccgtggaaatctccggcgtggaagatcggttcaacgcctccctgggcacataccacgatctgctgaaaattatcaaggacaaggacttcctggacaatgaggaaaacgaggacattctggaagatatcgtgctgaccctgacactgtttgaggacagagagatgatcgaggaacggctgaaaacctatgcccacctgttcgacgacaaagtgatgaagcagctgaagcggcggagatacaccggctggggcaggctgagccggaagctgatcaacggcatccgggacaagcagtccggcaagacaatcctggatttcctgaagtccgacggcttcgccaacagaaacttcatgcagctgatccacgacgacagcctgacctttaaagaggacatccagaaagcccaggtgtccggccagggcgatagcctgcacgagcacattgccaatctggccggcagccccgccattaagaagggcatcctgcagacagtgaaggtggtggacgagctcgtgaaagtgatgggccggcacaagcccgagaacatcgtgatcgaaatggccagagagaaccagaccacccagaagggacagaagaacagccgcgagagaatgaagcggatcgaagagggcatcaaagagctgggcagccagatcctgaaagaacaccccgtggaaaacacccagctgcagaacgagaagctgtacctgtactacctgcagaatgggcgggatatgtacgtggaccaggaactggacatcaaccggctgtccgactacgatgtggacgctatcgtgcctcagagctttctgaaggacgactccatcgataacaaagtgctgactcggagcgacaagaaccggggcaagagcgacaacgtgccctccgaagaggtcgtgaagaagatgaagaactactggcgccagctgctgaatgccaagctgattacccagaggaagttcgacaatctgaccaaggccgagagaggcggcctgagcgaactggataaggccggcttcatcaagagacagctggtggaaacccggcagatcacaaagcacgtggcacagatcctggactcccggatgaacactaagtacgacgagaacgacaaactgatccgggaagtgaaagtgatcaccctgaagtccaagctggtgtccgatttccggaaggatttccagttttacaaagtgcgcgagatcaacaactaccaccacgcccacgacgcctacctgaacgccgtcgtgggaaccgccctgatcaaaaagtaccctaagctggaaagcgagttcgtgtacggcgactacaaggtgtacgacgtgcggaagatgatcgccaagagcgagcaggaaatcggcaaggctaccgccaagtacttcttctacagcaacatcatgaactttttcaagaccgagattaccctggccaacggcgagatccggaagcggcctctgatcgagacaaacggcgaaacaggcgagatcgtgtgggataagggccgggactttgccaccgtgcggaaagtgctgtctatgccccaagtgaatatcgtgaaaaagaccgaggtgcagacaggcggcttcagcaaagagtctatcctgcccaagaggaacagcgacaagctgatcgccagaaagaaggactgggaccctaagaagtacggcggcttcgacagccccaccgtggcctattctgtgctggtggtggccaaagtggaaaagggcaagtccaagaaactgaagagtgtgaaagagctgctggggatcaccatcatggaaagaagcagcttcgagaagaatcccatcgactttctggaagccaagggctacaaagaagtgaaaaaggacctgatcatcaagctgcctaagtactccctgttcgagctggaaaacggccggaagagaatgctggcctctgccggcgaactgcagaagggaaacgaactggccctgccctccaaatatgtgaacttcctgtacctggccagccactatgagaagctgaagggctcccccgaggataatgagcagaaacagctgtttgtggaacagcacaaacactacctggacgagatcatcgagcagatcagcgagttctccaagagagtgatcctggccgacgctaatctggacaaggtgctgagcgcctacaacaagcacagagacaagcctatcagagagcaggccgagaatatcatccacctgtttaccctgaccaatctgggagcccctgccgccttcaagtactttgacaccaccatcgaccggaagaggtacaccagcaccaaagaggtgctggacgccaccctgatccaccagagcatcaccggcctgtacgagacacggatcgacctgtctcagctgggaggcgacgcctatccctatgacgtgcccgattatgccagcctgggcagcggctcccccaagaaaaaacgcaaggtggaagatcctaagaaaaagcggaaagtggacggcggagggccgagctctggcgcacccccaccaagtggagggtctcctgccgggtccccaacatctactgaagaaggcaccagcgaatccgcaacgcccgagtcaggccctggtacctccacagaaccatctgaaggtagtgcgcctggttccccagctggaagccctacttccaccgaagaaggcacgtcaaccgaaccaagtgaaggatctgcccctgggaccagcactgaaccatctgagatgaaccatgaccaggaatttgaccccccaaaggtttacccacctgtgccagctgagaagaggaagcccatccgcgtgctgtctctctttgatgggattgctacagggctcctggtgctgaaggacctgggcatccaagtggaccgctacattgcctccgaggtgtgtgaggactccatcacggtgggcatggtgcggcaccagggaaagatcatgtacgtcggggacgtccgcagcgtcacacagaagcatatccaggagtggggcccattcgacctggtgattggaggcagtccctgcaatgacctctccattgtcaaccctgcccgcaagggactttatgagggtactggccgcctcttctttgagttctaccgcctcctgcatgatgcgcggcccaaggagggagatgatcgccccttcttctggctctttgagaatgtggtggccatgggcgttagtgacaagagggacatctcgcgatttcttgagtctaaccccgtgatgattgacgccaaagaagtgtctgctgcacacagggcccgttacttctggggtaaccttcctggcatgaacaggcctttggcatccactgtgaatgataagctggagctgcaagagtgtctggagcacggcagaatagccaagttcagcaaagtgaggaccattaccaccaggtcaaactctataaagcagggcaaagaccagcatttccccgtcttcatgaacgagaaggaggacatcctgtggtgcactgaaatggaaagggtgtttggcttccccgtccactacacagacgtctccaacatgagccgcttggcgaggcagagactgctgggccgatcgtggagcgtgccggtcatccgccacctcttcgctccgctgaaggaatattttgcttgtgtgtctagcggcaatagtaacgctaacagccgcgggccgagcttcagcagcggcctggtgccgttaagcttgcgcggcagccatatgggccctatggagatatacaagacagtgtctgcatggaagagacagccagtgcgggtactgagcctcttcagaaacatcgacaaggtactaaagagtttgggcttcttggaaagcggttctggttctgggggaggaacgctgaagtacgtggaagatgtcacaaatgtcgtgaggagagacgtggagaaatggggcccctttgacctggtgtacggctcgacgcagcccctaggcagctcttgtgatcgctgtcccggctggtacatgttccagttccaccggatcctgcagtatgcgctgcctcgccaggagagtcagcggcccttcttctggatattcatggacaatctgctgctgactgaggatgaccaagagacaactacccgcttccttcagacagaggctgtgaccctccaggatgtccgtggcagagactaccagaatgctatgcgggtgtggagcaacattccagggctgaagagcaagcatgcgcccctgaccccaaaggaagaagagtatctgcaagcccaagtcagaagcaggagcaagctggacgccccgaaagttgacctcctggtgaagaactgccttctcccgctgagagagtacttcaagtatttttctcaaaactcacttcctcttgacggcagcggcagcgagacccccggtaccagcgagagcgccacccccgagagcatgaacaattcccagggaagagtgaccttcgaggatgtcactgtgaacttcacccagggggagtggcagcggctgaatcccgaacagagaaacttgtacagggatgtgatgctggagaattacagcaaccttgtctctgtgggacaaggggaaaccaccaaacccgatgtgatcttgaggttggaacaaggaaaggagccatggttggaggaagaggaagtgctgggaagtggccgtgcagaaaaaaatggggacattggagggcagatttggaagccaaaggatgtgaaagagagtctcctcgagtgataatagg

SEQ ID NO: 197 - DNA, 6459 bp, synthetic construct
  misc_feature 1..6459: note = V10 CDS
  source 1..6459: mol_type = other DNA
atgccaaaaaagaagagaaaggtaatggacaagaagtacagcatcggcctggccatcggcaccaactctgtgggctgggccgtgatcaccgacgagtacaaggtgcccagcaagaaattcaaggtgctgggcaacaccgaccggcacagcatcaagaagaacctgatcggcgccctgctgttcgacagcggagaaacagccgaggccacccggctgaagagaaccgccagaagaagatacaccagacggaagaaccggatctgctatctgcaagagatcttcagcaacgagatggccaaggtggacgacagcttcttccacagactggaagagtccttcctggtggaagaggataagaagcacgagcggcaccccatcttcggcaacatcgtggacgaggtggcctaccacgagaagtaccccaccatctaccacctgagaaagaaactggtggacagcaccgacaaggccgacctgcggctgatctatctggccctggcccacatgatcaagttccggggccacttcctgatcgagggcgacctgaaccccgacaacagcgacgtggacaagctgttcatccagctggtgcagacctacaaccagctgttcgaggaaaaccccatcaacgccagcggcgtggacgccaaggccatcctgtctgccagactgagcaagagcagacggctggaaaatctgatcgcccagctgcccggcgagaagaagaatggcctgttcggcaacctgattgccctgagcctgggcctgacccccaacttcaagagcaacttcgacctggccgaggatgccaaactgcagctgagcaaggacacctacgacgacgacctggacaacctgctggcccagatcggcgaccagtacgccgacctgtttctggccgccaagaacctgtccgacgccatcctgctgagcgacatcctgagagtgaacaccgagatcaccaaggcccccctgagcgcctctatgatcaagagatacgacgagcaccaccaggacctgaccctgctgaaagctctcgtgcggcagcagctgcctgagaagtacaaagagattttcttcgaccagagcaagaacggctacgccggctacatcgatggcggagccagccaggaagagttctacaagttcatcaagcccatcctggaaaagatggacggcaccgaggaactgctcgtgaagctgaacagagaggacctgctgcggaagcagcggaccttcgacaacggcagcatcccccaccagatccacctgggagagctgcacgccattctgcggcggcaggaagatttttacccattcctgaaggacaaccgggaaaagatcgagaagatcctgaccttccgcatcccctactacgtgggccctctggccaggggaaacagcagattcgcctggatgaccagaaagagcgaggaaaccatcaccccctggaacttcgaggaagtggtggacaagggcgccagcgcccagagcttcatcgagcggatgaccaacttcgataagaacctgcccaacgagaaggtgctgcccaagcacagcctgctgtacgagtacttcaccgtgtacaacgagctgaccaaagtgaaatacgtgaccgagggaatgagaaagcccgccttcctgagcggcgagcagaaaaaagccatcgtggacctgctgttcaagaccaaccggaaagtgaccgtgaagcagctgaaagaggactacttcaagaaaatcgagtgcttcgactccgtggaaatctccggcgtggaagatcggttcaacgcctccctgggcacataccacgatctgctgaaaattatcaaggacaaggacttcctggacaatgaggaaaacgaggacattctggaagatatcgtgctgaccctgacactgtttgaggacagagagatgatcgaggaacggctgaaaacctatgcccacctgttcgacgacaaagtgatgaagcagctgaagcggcggagatacaccggctggggcaggctgagccggaagctgatcaacggcatccgggacaagcagtccggcaagacaatcctggatttcctgaagtccgacggcttcgccaacagaaacttcatgcagctgatccacgacgacagcctgacctttaaagaggacatccagaaagcccaggtgtccggccagggcgatagcctgcacgagcacattgccaatctggccggcagccccgccattaagaagggcatcctgcagacagtgaaggtggtggacgagctcgtgaaagtgatgggccggcacaagcccgagaacatcgtgatcgaaatggccagagagaaccagaccacccagaagggacagaagaacagccgcgagagaatgaagcggatcgaagagggcatcaaagagctgggcagccagatcctgaaagaacaccccgtggaaaacacccagctgcagaacgagaagctgtacctgtactacctgcagaatgggcgggatatgtacgtggaccaggaactggacatcaaccggctgtccgactacgatgtggacgctatcgtgcctcagagctttctgaaggacgactccatcgataacaaagtgctgactcggagcgacaagaaccggggcaagagcgacaacgtgccctccgaagaggtcgtgaagaagatgaagaactactggcgccagctgctgaatgccaagctgattacccagaggaagttcgacaatctgaccaaggccgagagaggcggcctgagcgaactggataaggccggcttcatcaagagacagctggtggaaacccggcagatcacaaagcacgtggcacagatcctggactcccggatgaacactaagtacgacgagaacgacaaactgatccgggaagtgaaagtgatcaccctgaagtccaagctggtgtccgatttccggaaggatttccagttttacaaagtgcgcgagatcaacaactaccaccacgcccacgacgcctacctgaacgccgtcgtgggaaccgccctgatcaaaaagtaccctaagctggaaagcgagttcgtgtacggcgactacaaggtgtacgacgtgcggaagatgatcgccaagagcgagcaggaaatcggcaaggctaccgccaagtacttcttctacagcaacatcatgaactttttcaagaccgagattaccctggccaacggcgagatccggaagcggcctctgatcgagacaaacggcgaaacaggcgagatcgtgtgggataagggccgggactttgccaccgtgcggaaagtgctgtctatgccccaagtgaatatcgtgaaaaagaccgaggtgcagacaggcggcttcagcaaagagtctatcctgcccaagaggaacagcgacaagctgatcgccagaaagaaggactgggaccctaagaagtacggcggcttcgacagccccaccgtggcctattctgtgctggtggtggccaaagtggaaaagggcaagtccaagaaactgaagagtgtgaaagagctgctggggatcaccatcatggaaagaagcagcttcgagaagaatcccatcgactttctggaagccaagggctacaaagaagtgaaaaaggacctgatcatcaagctgcctaagtactccctgttcgagctggaaaacggccggaagagaatgctggcctctgccggcgaactgcagaagggaaacgaactggccctgccctccaaatatgtgaacttcctgtacctggccagccactatgagaagctgaagggctcccccgaggataatgagcagaaacagctgtttgtggaacagcacaaacactacctggacgagatcatcgagcagatcagcgagttctccaagagagtgatcctggccgacgctaatctggacaaggtgctgagcgcctacaacaagcacagagacaagcctatcagagagcaggccgagaatatcatccacctgtttaccctgaccaatctgggagcccctgccgccttcaagtactttgacaccaccatcgaccggaagaggtacaccagcaccaaagaggtgctggacgccaccctgatccaccagagcatcaccggcctgtacgagacacggatcgacctgtctcagctgggaggcgacgcctatccctatgacgtgcccgattatgccagcctgggcagcggctcccccaagaaaaaacgcaaggtggaagatcctaagaaaaagcggaaagtggacggcggagggccgagctctggcgcacccccaccaagtggagggtctcctgccgggtccccaacatctactgaagaaggcaccagcgaatccgcaacgcccgagtcaggccctggtacctccacagaaccatctgaaggtagtgcgcctggttccccagctggaagccctacttccaccgaagaaggcacgtcaaccgaaccaagtgaaggatctgcccctgggaccagcactgaaccatctgagatgaacaattcccagggaagagtgaccttcgaggatgtcactgtgaacttcacccagggggagtggcagcggctgaatcccgaacagagaaacttgtacagggatgtgatgctggagaattacagcaaccttgtctctgtgggacaaggggaaaccaccaaacccgatgtgatcttgaggttggaacaaggaaaggagccatggttggaggaagaggaagtgctgggaagtggccgtgcagaaaaaaatggggacattggagggcagatttggaagccaaaggatgtgaaagagagtctcagcggcagcgagacccccggtaccagcgagagcgccacccccgagagcatgaaccatgaccaggaatttgaccccccaaaggtttacccacctgtgccagctgagaagaggaagcccatccgcgtgctgtctctctttgatgggattgctacagggctcctggtgctgaaggacctgggcatccaagtggaccgctacattgcctccgaggtgtgtgaggactccatcacggtgggcatggtgcggcaccagggaaagatcatgtacgtcggggacgtccgcagcgtcacacagaagcatatccaggagtggggcccattcgacctggtgattggaggcagtccctgcaatgacctctccattgtcaaccctgcccgcaagggactttatgagggtactggccgcctcttctttgagttctaccgcctcctgcatgatgcgcggcccaaggagggagatgatcgccccttcttctggctctttgagaatgtggtggccatgggcgttagtgacaagagggacatctcgcgatttcttgagtctaaccccgtgatgattgacgccaaagaagtgtctgctgcacacagggcccgttacttctggggtaaccttcctggcatgaacaggcctttggcatccactgtgaatgataagctggagctgcaagagtgtctggagcacggcagaatagccaagttcagcaaagtgaggaccattaccaccaggtcaaactctataaagcagggcaaagaccagcatttccccgtcttcatgaacgagaaggaggacatcctgtggtgcactgaaatggaaagggtgtttggcttccccgtccactacacagacgtctccaacatgagccgcttggcgaggcagagactgctgggccgatcgtggagcgtgccggtcatccgccacctcttcgctccgctgaaggaatattttgcttgtgtgtctagcggcaatagtaacgctaacagccgcgggccgagcttcagcagcggcctggtgccgttaagcttgcgcggcagccatatgggccctatggagatatacaagacagtgtctgcatggaagagacagccagtgcgggtactgagcctcttcagaaacatcgacaaggtactaaagagtttgggcttcttggaaagcggttctggttctgggggaggaacgctgaagtacgtggaagatgtcacaaatgtcgtgaggagagacgtggagaaatggggcccctttgacctggtgtacggctcgacgcagcccctaggcagctcttgtgatcgctgtcccggctggtacatgttccagttccaccggatcctgcagtatgcgctgcctcgccaggagagtcagcggcccttcttctggatattcatggacaatctgctgctgactgaggatgaccaagagacaactacccgcttccttcagacagaggctgtgaccctccaggatgtccgtggcagagactaccagaatgctatgcgggtgtggagcaacattccagggctgaagagcaagcatgcgcccctgaccccaaaggaagaagagtatctgcaagcccaagtcagaagcaggagcaagctggacgccccgaaagttgacctcctggtgaagaactgccttctcccgctgagagagtacttcaagtatttttctcaaaactcacttcctcttctcgagtaa

SEQ ID NO: 198 - DNA, 6459 bp, synthetic construct
  misc_feature 1..6459: note = V11 CDS
  source 1..6459: mol_type = other DNA
atgccaaaaaagaagagaaaggtaatggacaagaagtacagcatcggcctggccatcggcaccaactctgtgggctgggccgtgatcaccgacgagtacaaggtgcccagcaagaaattcaaggtgctgggcaacaccgaccggcacagcatcaagaagaacctgatcggcgccctgctgttcgacagcggagaaacagccgaggccacccggctgaagagaaccgccagaagaagatacaccagacggaagaaccggatctgctatctgcaagagatcttcagcaacgagatggccaaggtggacgacagcttcttccacagactggaagagtccttcctggtggaagaggataagaagcacgagcggcaccccatcttcggcaacatcgtggacgaggtggcctaccacgagaagtaccccaccatctaccacctgagaaagaaactggtggacagcaccgacaaggccgacctgcggctgatctatctggccctggcccacatgatcaagttccggggccacttcctgatcgagggcgacctgaaccccgacaacagcgacgtggacaagctgttcatccagctggtgcagacctacaaccagctgttcgaggaaaaccccatcaacgccagcggcgtggacgccaaggccatcctgtctgccagactgagcaagagcagacggctggaaaatctgatcgcccagctgcccggcgagaagaagaatggcctgttcggcaacctgattgccctgagcctgggcctgacccccaacttcaagagcaacttcgacctggccgaggatgccaaactgcagctgagcaaggacacctacgacgacgacctggacaacctgctggcccagatcggcgaccagtacgccgacctgtttctggccgccaagaacctgtccgacgccatcctgctgagcgacatcctgagagtgaacaccgagatcaccaaggcccccctgagcgcctctatgatcaagagatacgacgagcaccaccaggacctgaccctgctgaaagctctcgtgcggcagcagctgcctgagaagtacaaagagattttcttcgaccagagcaagaacggctacgccggctacatcgatggcggagccagccaggaagagttctacaagttcatcaagcccatcctggaaaagatggacggcaccgaggaactgctcgtgaagctgaacagagaggacctgctgcggaagcagcggaccttcgacaacggcagcatcccccaccagatccacctgggagagctgcacgccattctgcggcggcaggaagatttttacccattcctgaaggacaaccgggaaaagatcgagaagatcctgaccttccgcatcccctactacgtgggccctctggccaggggaaacagcagattcgcctggatgaccagaaagagcgaggaaaccatcaccccctggaacttcgaggaagtggtggacaagggcgccagcgcccagagcttcatcgagcggatgaccaacttcgataagaacctgcccaacgagaaggtgctgcccaagcacagcctgctgtacgagtacttcaccgtgtacaacgagctgaccaaagtgaaatacgtgaccgagggaatgagaaagcccgccttcctgagcggcgagcagaaaaaagccatcgtggacctgctgttcaagaccaaccggaaagtgaccgtgaagcagctgaaagaggactacttcaagaaaatcgagtgcttcgactccgtggaaatctccggcgtggaagatcggttcaacgcctccctgggcacataccacgatctgctgaaaattatcaaggacaaggacttcctggacaatgaggaaaacgaggacattctggaagatatcgtgctgaccctgacactgtttgaggacagagagatgatcgaggaacggctgaaaacctatgcccacctgttcgacgacaaagtgatgaagcagctgaagcggcggagatacaccggctggggcaggctgagccggaagctgatcaacggcatccgggacaagcagtccggcaagacaatcctggatttcctgaagtccgacggcttcgccaacagaaacttcatgcagctgatccacgacgacagcctgacctttaaagaggacatccagaaagcccaggtgtccggccagggcgatagcctgcacgagcacattgccaatctggccggcagccccgccattaagaagggcatcctgcagacagtgaaggtggtggacgagctcgtgaaagtgatgggccggcacaagcccgagaacatcgtgatcgaaatggccagagagaaccagaccacccagaagggacagaagaacagccgcgagagaatgaagcggatcgaagagggcatcaaagagctgggcagccagatcctgaaagaacaccccgtggaaaacacccagctgcagaacgagaagctgtacctgtactacctgcagaatgggcgggatatgtacgtggaccaggaactggacatcaaccggctgtccgactacgatgtggacgctatcgtgcctcagagctttctgaaggacgactccatcgataacaaagtgctgactcggagcgacaagaaccggggcaagagcgacaacgtgccctccgaagaggtcgtgaagaagatgaagaactactggcgccagctgctgaatgccaagctgattacccagaggaagttcgacaatctgaccaaggccgagagaggcggcctgagcgaactggataaggccggcttcatcaagagacagctggtggaaacccggcagatcacaaagcacgtggcacagatcctggactcccggatgaacactaagtacgacgagaacgacaaactgatccgggaagtgaaagtgatcaccctgaagtccaagctggtgtccgatttccggaaggatttccagttttacaaagtgcgcgagatcaacaactaccaccacgcccacgacgcctacctgaacgccgtcgtgggaaccgccctgatcaaaaagtaccctaagctggaaagcgagttcgtgtacggcgactacaaggtgtacgacgtgcggaagatgatcgccaagagcgagcaggaaatcggcaaggctaccgccaagtacttcttctacagcaacatcatgaactttttcaagaccgagattaccctggccaacggcgagatccggaagcggcctctgatcgagacaaacggcgaaacaggcgagatcgtgtgggataagggccgggactttgccaccgtgcggaaagtgctgtctatgccccaagtgaatatcgtgaaaaagaccgaggtgcagacaggcggcttcagcaaagagtctatcctgcccaagaggaacagcgacaagctgatcgccagaaagaaggactgggaccctaagaagtacggcggcttcgacagccccaccgtggcctattctgtgctggtggtggccaaagtggaaaagggcaagtccaagaaactgaagagtgtgaaagagctgctggggatcaccatcatggaaagaagcagcttcgagaagaatcccatcgactttctggaagccaagggctacaaagaagtgaaaaaggacctgatcatcaagctgcctaagtactccctgttcgagctggaaaacggccggaagagaatgctggcctctgccggcgaactgcagaagggaaacgaactggccctgccctccaaatatgtgaacttcctgtacctggccagccactatgagaagctgaagggctcccccgaggataatgagcagaaacagctgtttgtggaacagcacaaacactacctggacgagatcatcgagcagatcagcgagttctccaagagagtgatcctggccgacgctaatctggacaaggtgctgagcgcctacaacaagcacagagacaagcctatcagagagcaggccgagaatatcatccacctgtttaccctgaccaatctgggagcccctgccgccttcaagtactttgacaccaccatcgaccggaagaggtacaccagcaccaaagaggtgctggacgccaccctgatccaccagagcatcaccggcctgtacgagacacggatcgacctgtctcagctgggaggcgacgcctatccctatgacgtgcccgattatgccagcctgggcagcggctcccccaagaaaaaacgcaaggtggaagatcctaagaaaaagcggaaagtggacggcggagggccgagctctggcgcacccccaccaagtggagggtctcctgccgggtccccaacatctactgaagaaggcaccagcgaatccgcaacgcccgagtcaggccctggtacctccacagaaccatctgaaggtagtgcgcctggttccccagctggaagccctacttccaccgaagaaggcacgtcaaccgaaccaagtgaaggatctgcccctgggaccagcactgaaccatctgagatgaacaattcccagggaagagtgaccttcgaggacgtgaccgtgaacttcacccaaggcgagtggcagagactgaaccccgagcagagaaacctgtaccgggacgtgatgctggaaaactacagcaacctggtgtccgtcggccagggcgagacaacaaagcctgacgtgatcctgcggctggaacagggcaaagagccttggctggaagaggaagaggtgctcggatctggcagagccgagaagaatggcgatatcggcggacagatctggaagccaaaggatgtgaaagagagtctcagcggcagcgagacccccggtaccagcgagagcgccacccccgagagcatgggccctatggagatatacaagacagtgtctgcatggaagagacagccagtgcgggtactgagcctcttcagaaacatcgacaaggtactaaagagtttgggcttcttggaaagcggttctggttctgggggaggaacgctgaagtacgtggaagatgtcacaaatgtcgtgaggagagacgtggagaaatggggcccctttgacctggtgtacggctcgacgcagcccctaggcagctcttgtgatcgctgtcccggctggtacatgttccagttccaccggatcctgcagtatgcgctgcctcgccaggagagtcagcggcccttcttctggatattcatggacaatctgctgctgactgaggatgaccaagagacaactacccgcttccttcagacagaggctgtgaccctccaggatgtccgtggcagagactaccagaatgctatgcgggtgtggagcaacattccagggctgaagagcaagcatgcgcccctgaccccaaaggaagaagagtatctgcaagcccaagtcagaagcaggagcaagctggacgccccgaaagttgacctcctggtgaagaactgccttctcccgctgagagagtacttcaagtatttttctcaaaactcacttcctctttctagcggcaatagtaacgctaacagccgcgggccgagcttcagcagcggcctggtgccgttaagcttgcgcggcagccatatgaaccatgaccaggaatttgaccccccaaaggtttacccacctgtgccagctgagaagaggaagcccatccgcgtgctgtctctctttgatgggattgctacagggctcctggtgctgaaggacctgggcatccaagtggaccgctacattgcctccgaggtgtgtgaggactccatcacggtgggcatggtgcggcaccagggaaagatcatgtacgtcggggacgtccgcagcgtcacacagaagcatatccaggagtggggcccattcgacctggtgattggaggcagtccctgcaatgacctctccattgtcaaccctgcccgcaagggactttatgagggtactggccgcctcttctttgagttctaccgcctcctgcatgatgcgcggcccaaggagggagatgatcgccccttcttctggctctttgagaatgtggtggccatgggcgttagtgacaagagggacatctcgcgatttcttgagtctaaccccgtgatgattgacgccaaagaagtgtctgctgcacacagggcccgttacttctggggtaaccttcctggcatgaacaggcctttggcatccactgtgaatgataagctggagctgcaagagtgtctggagcacggcagaatagccaagttcagcaaagtgaggaccattaccaccaggtcaaactctataaagcagggcaaagaccagcatttccccgtcttcatgaacgagaaggaggacatcctgtggtgcactgaaatggaaagggtgtttggcttccccgtccactacacagacgtctccaacatgagccgcttggcgaggcagagactgctgggccgatcgtggagcgtgccggtcatccgccacctcttcgctccgctgaaggaatattttgcttgtgtgctcgagtaa

SEQ ID NO: 199 - DNA, 6591 bp, synthetic construct
  misc_feature 1..6591: note = V14 CDS
  source 1..6591: mol_type = other DNA
atgccaaaaaagaagagaaaggtaatggacaagaagtacagcatcggcctggccatcggcaccaactctgtgggctgggccgtgatcaccgacgagtacaaggtgcccagcaagaaattcaaggtgctgggcaacaccgaccggcacagcatcaagaagaacctgatcggcgccctgctgttcgacagcggagaaacagccgaggccacccggctgaagagaaccgccagaagaagatacaccagacggaagaaccggatctgctatctgcaagagatcttcagcaacgagatggccaaggtggacgacagcttcttccacagactggaagagtccttcctggtggaagaggataagaagcacgagcggcaccccatcttcggcaacatcgtggacgaggtggcctaccacgagaagtaccccaccatctaccacctgagaaagaaactggtggacagcaccgacaaggccgacctgcggctgatctatctggccctggcccacatgatcaagttccggggccacttcctgatcgagggcgacctgaaccccgacaacagcgacgtggacaagctgttcatccagctggtgcagacctacaaccagctgttcgaggaaaaccccatcaacgccagcggcgtggacgccaaggccatcctgtctgccagactgagcaagagcagacggctggaaaatctgatcgcccagctgcccggcgagaagaagaatggcctgttcggcaacctgattgccctgagcctgggcctgacccccaacttcaagagcaacttcgacctggccgaggatgccaaactgcagctgagcaaggacacctacgacgacgacctggacaacctgctggcccagatcggcgaccagtacgccgacctgtttctggccgccaagaacctgtccgacgccatcctgctgagcgacatcctgagagtgaacaccgagatcaccaaggcccccctgagcgcctctatgatcaagagatacgacgagcaccaccaggacctgaccctgctgaaagctctcgtgcggcagcagctgcctgagaagtacaaagagattttcttcgaccagagcaagaacggctacgccggctacatcgatggcggagccagccaggaagagttctacaagttcatcaagcccatcctggaaaagatggacggcaccgaggaactgctcgtgaagctgaacagagaggacctgctgcggaagcagcggaccttcgacaacggcagcatcccccaccagatccacctgggagagctgcacgccattctgcggcggcaggaagatttttacccattcctgaaggacaaccgggaaaagatcgagaagatcctgaccttccgcatcccctactacgtgggccctctggccaggggaaacagcagattcgcctggatgaccagaaagagcgaggaaaccatcaccccctggaacttcgaggaagtggtggacaagggcgccagcgcccagagcttcatcgagcggatgaccaacttcgataagaacctgcccaacgagaaggtgctgcccaagcacagcctgctgtacgagtacttcaccgtgtacaacgagctgaccaaagtgaaatacgtgaccgagggaatgagaaagcccgccttcctgagcggcgagcagaaaaaagccatcgtggacctgctgttcaagaccaaccggaaagtgaccgtgaagcagctgaaagaggactacttcaagaaaatcgagtgcttcgactccgtggaaatctccggcgtggaagatcggttcaacgcctccctgggcacataccacgatctgctgaaaattatcaaggacaaggacttcctggacaatgaggaaaacgaggacattctggaagatatcgtgctgaccctgacactgtttgaggacagagagatgatcgaggaacggctgaaaacctatgcccacctgttcgacgacaaagtgatgaagcagctgaagcggcggagatacaccggctggggcaggctgagccggaagctgatcaacggcatccgggacaagcagtccggcaagacaatcctggatttcctgaagtccgacggcttcgccaacagaaacttcatgcagctgatccacgacgacagcctgacctttaaagaggacatccagaaagcccaggtgtccggccagggcgatagcctgcacgagcacattgccaatctggccggcagccccgccattaagaagggcatcctgcagacagtgaaggtggtggacgagctcgtgaaagtgatgggccggcacaagcccgagaacatcgtgatcgaaatggccagagagaaccagaccacccagaagggacagaagaacagccgcgagagaatgaagcggatcgaagagggcatcaaagagctgggcagccagatcctgaaagaacaccccgtggaaaacacccagctgcagaacgagaagctgtacctgtactacctgcagaatgggcgggatatgtacgtggaccaggaactggacatcaaccggctgtccgactacgatgtggacgctatcgtgcctcagagctttctgaaggacgactccatcgataacaaagtgctgactcggagcgacaagaaccggggcaagagcgacaacgtgccctccgaagaggtcgtgaagaagatgaagaactactggcgccagctgctgaatgccaagctgattacccagaggaagttcgacaatctgaccaaggccgagagaggcggcctgagcgaactggataaggccggcttcatcaagagacagctggtggaaacccggcagatcacaaagcacgtggcacagatcctggactcccggatgaacactaagtacgacgagaacgacaaactgatccgggaagtgaaagtgatcaccctgaagtccaagctggtgtccgatttccggaaggatttccagttttacaaagtgcgcgagatcaacaactaccaccacgcccacgacgcctacctgaacgccgtcgtgggaaccgccctgatcaaaaagtaccctaagctggaaagcgagttcgtgtacggcgactacaaggtgtacgacgtgcggaagatgatcgccaagagcgagcaggaaatcggcaaggctaccgccaagtacttcttctacagcaacatcatgaactttttcaagaccgagattaccctggccaacggcgagatccggaagcggcctctgatcgagacaaacggcgaaacaggcgagatcgtgtgggataagggccgggactttgccaccgtgcggaaagtgctgtctatgccccaagtgaatatcgtgaaaaagaccgaggtgcagacaggcggcttcagcaaagagtctatcctgcccaagaggaacagcgacaagctgatcgccagaaagaaggactgggaccctaagaagtacggcggcttcgacagccccaccgtggcctattctgtgctggtggtggccaaagtggaaaagggcaagtccaagaaactgaagagtgtgaaagagctgctggggatcaccatcatggaaagaagcagcttcgagaagaatcccatcgactttctggaagccaagggctacaaagaagtgaaaaaggacctgatcatcaagctgcctaagtactccctgttcgagctggaaaacggccggaagagaatgctggcctctgccggcgaactgcagaagggaaacgaactggccctgccctccaaatatgtgaacttcctgtacctggccagccactatgagaagctgaagggctcccccgaggataatgagcagaaacagctgtttgtggaacagcacaaacactacctggacgagatcatcgagcagatcagcgagttctccaagagagtgatcctggccgacgctaatctggacaaggtgctgagcgcctacaacaagcacagagacaagcctatcagagagcaggccgagaatatcatccacctgtttaccctgaccaatctgggagcccctgccgccttcaagtactttgacaccaccatcgaccggaagaggtacaccagcaccaaagaggtgctggacgccaccctgatccaccagagcatcaccggcctgtacgagacacggatcgacctgtctcagctgggaggcgacgcctatccctatgacgtgcccgattatgccagcctgggcagcggctcccccaagaaaaaacgcaaggtggaagatcctaagaaaaagcggaaagtggacggcggagggccgagctctggcgcacccccaccaagtggagggtctcctgccgggtccccaacatctactgaagaaggcaccagcgaatccgcaacgcccgagtcaggccctggtacctccacagaaccatctgaaggtagtgcgcctggttccccagctggaagccctacttccaccgaagaaggcacgtcaaccgaaccaagtgaaggatctgcccctgggaccagcactgaaccatctgagatgaacaattcccagggaagagtgaccttcgaggatgtcactgtgaacttcacccagggggagtggcagcggctgaatcccgaacagagaaacttgtacagggatgtgatgctggagaattacagcaaccttgtctctgtgggacaaggggaaaccaccaaacccgatgtgatcttgaggttggaacaaggaaaggagccatggttggaggaagaggaagtgctgggaagtggccgtgcagaaaaaaatggggacattggagggcagatttggaagccaaaggatgtgaaagagagtctcagcggcagcgagacccccggtaccagcgagggcggccctagcagcggcgcccctccccctagcggcggcagccctgccggatcccctacaagcaccgaggagggcacaagcaccgagccttccgagggcagcgcccccggaacaagcaccgaacctagcgagagcgccacccccgagagcatgggccctatggagatatacaagacagtgtctgcatggaagagacagccagtgcgggtactgagcctcttcagaaacatcgacaaggtactaaagagtttgggcttcttggaaagcggttctggttctgggggaggaacgctgaagtacgtggaagatgtcacaaatgtcgtgaggagagacgtggagaaatggggcccctttgacctggtgtacggctcgacgcagcccctaggcagctcttgtgatcgctgtcccggctggtacatgttccagttccaccggatcctgcagtatgcgctgcctcgccaggagagtcagcggcccttcttctggatattcatggacaatctgctgctgactgaggatgaccaagagacaactacccgcttccttcagacagaggctgtgaccctccaggatgtccgtggcagagactaccagaatgctatgcgggtgtggagcaacattccagggctgaagagcaagcatgcgcccctgaccccaaaggaagaagagtatctgcaagcccaagtcagaagcaggagcaagctggacgccccgaaagttgacctcctggtgaagaactgccttctcccgctgagagagtacttcaagtatttttctcaaaactcacttcctctttctagcggcaatagtaacgctaacagccgcgggccgagcttcagcagcggcctggtgccgttaagcttgcgcggcagccatatgaaccatgaccaggaatttgaccccccaaaggtttacccacctgtgccagctgagaagaggaagcccatccgcgtgctgtctctctttgatgggattgctacagggctcctggtgctgaaggacctgggcatccaagtggaccgctacattgcctccgaggtgtgtgaggactccatcacggtgggcatggtgcggcaccagggaaagatcatgtacgtcggggacgtccgcagcgtcacacagaagcatatccaggagtggggcccattcgacctggtgattggaggcagtccctgcaatgacctctccattgtcaaccctgcccgcaagggactttatgagggtactggccgcctcttctttgagttctaccgcctcctgcatgatgcgcggcccaaggagggagatgatcgccccttcttctggctctttgagaatgtggtggccatgggcgttagtgacaagagggacatctcgcgatttcttgagtctaaccccgtgatgattgacgccaaagaagtgtctgctgcacacagggcccgttacttctggggtaaccttcctggcatgaacaggcctttggcatccactgtgaatgataagctggagctgcaagagtgtctggagcacggcagaatagccaagttcagcaaagtgaggaccattaccaccaggtcaaactctataaagcagggcaaagaccagcatttccccgtcttcatgaacgagaaggaggacatcctgtggtgcactgaaatggaaagggtgtttggcttccccgtccactacacagacgtctccaacatgagccgcttggcgaggcagagactgctgggccgatcgtggagcgtgccggtcatccgccacctcttcgctccgctgaaggaatattttgcttgtgtgctcgagtaa

SEQ ID NO: 200 - DNA, 6700 bp, synthetic construct
  misc_feature 1..6700: note = V15 CDS
  source 1..6700: mol_type = other DNA
atggtccctgctgctaagagagtgaaactggatggatccgacaagaagtacagcatcggcctggccatcggcaccaactctgtgggctgggccgtgatcaccgacgagtacaaggtgcccagcaagaaattcaaggtgctgggcaacaccgaccggcacagcatcaagaagaacctgatcggcgccctgctgttcgacagcggagaaacagccgaggccacccggctgaagagaaccgccagaagaagatacaccagacggaagaaccggatctgctatctgcaagagatcttcagcaacgagatggccaaggtggacgacagcttcttccacagactggaagagtccttcctggtggaagaggataagaagcacgagcggcaccccatcttcggcaacatcgtggacgaggtggcctaccacgagaagtaccccaccatctaccacctgagaaagaaactggtggacagcaccgacaaggccgacctgcggctgatctatctggccctggcccacatgatcaagttccggggccacttcctgatcgagggcgacctgaaccccgacaacagcgacgtggacaagctgttcatccagctggtgcagacctacaaccagctgttcgaggaaaaccccatcaacgccagcggcgtggacgccaaggccatcctgtctgccagactgagcaagagcagacggctggaaaatctgatcgcccagctgcccggcgagaagaagaatggcctgttcggcaacctgattgccctgagcctgggcctgacccccaacttcaagagcaacttcgacctggccgaggatgccaaactgcagctgagcaaggacacctacgacgacgacctggacaacctgctggcccagatcggcgaccagtacgccgacctgtttctggccgccaagaacctgtccgacgccatcctgctgagcgacatcctgagagtgaacaccgagatcaccaaggcccccctgagcgcctctatgatcaagagatacgacgagcaccaccaggacctgaccctgctgaaagctctcgtgcggcagcagctgcctgagaagtacaaagagattttcttcgaccagagcaagaacggctacgccggctacatcgatggcggagccagccaggaagagttctacaagttcatcaagcccatcctggaaaagatggacggcaccgaggaactgctcgtgaagctgaacagagaggacctgctgcggaagcagcggaccttcgacaacggcagcatcccccaccagatccacctgggagagctgcacgccattctgcggcggcaggaagatttttacccattcctgaaggacaaccgggaaaagatcgagaagatcctgaccttccgcatcccctactacgtgggccctctggccaggggaaacagcagattcgcctggatgaccagaaagagcgaggaaaccatcaccccctggaacttcgaggaagtggtggacaagggcgccagcgcccagagcttcatcgagcggatgaccaacttcgataagaacctgcccaacgagaaggtgctgcccaagcacagcctgctgtacgagtacttcaccgtgtacaacgagctgaccaaagtgaaatacgtgaccgagggaatgagaaagcccgccttcctgagcggcgagcagaaaaaagccatcgtggacctgctgttcaagaccaaccggaaagtgaccgtgaagcagctgaaagaggactacttcaagaaaatcgagtgcttcgactccgtggaaatctccggcgtggaagatcggttcaacgcctccctgggcacataccacgatctgctgaaaattatcaaggacaaggacttcctggacaatgaggaaaacgaggacattctggaagatatcgtgctgaccctgacactgtttgaggacagagagatgatcgaggaacggctgaaaacctatgcccacctgttcgacgacaaagtgatgaagcagctgaagcggcggagatacaccggctggggcaggctgagccggaagctgatcaacggcatccgggacaagcagtccggcaagacaatcctggatttcctgaagtccgacggcttcgccaacagaaacttcatgcagctgatccacgacgacagcctgacctttaaagaggacatccagaaagcccaggtgtccggccagggcgatagcctgcacgagcacattgccaatctggccggcagccccgccattaagaagggcatcctgcagacagtgaaggtggtggacgagctcgtgaaagtgatgggccggcacaagcccgagaacatcgtgatcgaaatggccagagagaaccagaccacccagaagggacagaagaacagccgcgagagaatgaagcggatcgaagagggcatcaaagagctgggcagccagatcctgaaagaacaccccgtggaaaacacccagctgcagaacgagaagctgtacctgtactacctgcagaatgggcgggatatgtacgtggaccaggaactggacatcaaccggctgtccgactacgatgtggacgctatcgtgcctcagagctttctgaaggacgactccatcgataacaaagtgctgactcggagcgacaagaaccggggcaagagcgacaacgtgccctccgaagaggtcgtgaagaagatgaagaactactggcgccagctgctgaatgccaagctgattacccagaggaagttcgacaatctgaccaaggccgagagaggcggcctgagcgaactggataaggccggcttcatcaagagacagctggtggaaacccggcagatcacaaagcacgtggcacagatcctggactcccggatgaacactaagtacgacgagaacgacaaactgatccgggaagtgaaagtgatcaccctgaagtccaagctggtgtccgatttccggaaggatttccagttttacaaagtgcgcgagatcaacaactaccaccacgcccacgacgcctacctgaacgccgtcgtgggaaccgccctgatcaaaaagtaccctaagctggaaagcgagttcgtgtacggcgactacaaggtgtacgacgtgcggaagatgatcgccaagagcgagcaggaaatcggcaaggctaccgccaagtacttcttctacagcaacatcatgaactttttcaagaccgagattaccctggccaacggcgagatccggaagcggcctctgatcgagacaaacggcgaaacaggcgagatcgtgtgggataagggccgggactttgccaccgtgcggaaagtgctgtctatgccccaagtgaatatcgtgaaaaagaccgaggtgcagacaggcggcttcagcaaagagtctatcctgcccaagaggaacagcgacaagctgatcgccagaaagaaggactgggaccctaagaagtacggcggcttcgacagccccaccgtggcctattctgtgctggtggtggccaaagtggaaaagggcaagtccaagaaactgaagagtgtgaaagagctgctggggatcaccatcatggaaagaagcagcttcgagaagaatcccatcgactttctggaagccaagggctacaaagaagtgaaaaaggacctgatcatcaagctgcctaagtactccctgttcgagctggaaaacggccggaagagaatgctggcctctgccggcgaactgcagaagggaaacgaactggccctgccctccaaatatgtgaacttcctgtacctggccagccactatgagaagctgaagggctcccccgaggataatgagcagaaacagctgtttgtggaacagcacaaacactacctggacgagatcatcgagcagatcagcgagttctccaagagagtgatcctggccgacgctaatctggacaaggtgctgagcgcctacaacaagcacagagacaagcctatcagagagcaggccgagaatatcatccacctgtttaccctgaccaatctgggagcccctgccgccttcaagtactttgacaccaccatcgaccggaagaggtacaccagcaccaaagaggtgctggacgccaccctgatccaccagagcatcaccggcctgtacgagacacggatcgacctgtctcagctgggaggcgacgcctatccctatgacgtgcccgattatgccagcctgggcagcggctcccccaagaaaaaacgcaaggtggaagatcctaagaaaaagcggaaagtggacggcggagggccgagctctggcgcacccccaccaagtggagggtctcctgccgggtccccaacatctactgaagaaggcaccagcgaatccgcaacgcccgagtcaggccctggtacctccacagaaccatctgaaggtagtgcgcctggttccccagctggaagccctacttccaccgaagaaggcacgtcaaccgaaccaagtgaaggatctgcccctgggaccagcactgaaccatctgagatgaacaattcccagggaagagtgaccttcgaggacgtgaccgtgaacttcacccaaggcgagtggcagagactgaaccccgagcagagaaacctgtaccgggacgtgatgctggaaaactacagcaacctggtgtccgtcggccagggcgagacaacaaagcctgacgtgatcctgcggctggaacagggcaaagagccttggctggaagaggaagaggtgctcggatctggcagagccgagaagaatggcgatatcggcggacagatctggaagccaaaggatgtgaaagagagtctcagcggcagcgagacccccggtaccagcgagagcgctacacccgaatccggccccggcagccccgccggcagccctacaagcaccgaggagggcacctccgaatccgccacccctgagagcggacccggcagcgagcctgccacaagcggcagcgagacacctggaacaagcgagagcgccacacctgaaagcggccccggaacatccaccgagcctagcgagggcagcgcccctggcacaagcacagagccttccgagagcgccacccccgagagcatgggccctatggagatatacaagacagtgtctgcatggaagagacagccagtgcgggtactgagcctcttcagaaacatcgacaaggtactaaagagtttgggcttcttggaaagcggttctggttctgggggaggaacgctgaagtacgtggaagatgtcacaaatgtcgtgaggagagacgtggagaaatggggcccctttgacctggtgtacggctcgacgcagcccctaggcagctcttgtgatcgctgtcccggctggtacatgttccagttccaccggatcctgcagtatgcgctgcctcgccaggagagtcagcggcccttcttctggatattcatggacaatctgctgctgactgaggatgaccaagagacaactacccgcttccttcagacagaggctgtgaccctccaggatgtccgtggcagagactaccagaatgctatgcgggtgtggagcaacattccagggctgaagagcaagcatgcgcccctgaccccaaaggaagaagagtatctgcaagcccaagtcagaagcaggagcaagctggacgccccgaaagttgacctcctggtgaagaactgccttctcccgctgagagagtacttcaagtatttttctcaaaactcacttcctctttctagcggcaatagtaacgctaacagccgcgggccgagcttcagcagcggcctggtgccgttgagcttgcgcggcagccatatgaaccatgaccaggaatttgaccccccaaaggtttacccacctgtgccagctgagaagaggaagcccatccgcgtgctgtctctctttgatgggattgctacagggctcctggtgctgaaggacctgggcatccaagtggaccgctacattgcctccgaggtgtgtgaggactccatcacggtgggcatggtgcggcaccagggaaagatcatgtacgtcggggacgtccgcagcgtcacacagaagcatatccaggagtggggcccattcgacctggtgattggaggcagtccctgcaatgacctctccattgtcaaccctgcccgcaagggactttatgagggtactggccgcctcttctttgagttctaccgcctcctgcatgatgcgcggcccaaggagggagatgatcgccccttcttctggctctttgagaatgtggtggccatgggcgttagtgacaagagggacatctcgcgatttcttgagtctaaccccgtgatgattgacgccaaagaagtgtctgctgcacacagggcccgttacttctggggtaaccttcctggcatgaacaggcctttggcatccactgtgaatgataagctggagctgcaagagtgtctggagcacggcagaatagccaagttcagcaaagtgaggaccattaccaccaggtcaaactctataaagcagggcaaagaccagcatttccccgtcttcatgaacgagaaggaggacatcctgtggtgcactgaaatggaaagggtgtttggcttccccgtccactacacagacgtctccaacatgagccgcttggcgaggcagagactgctgggccgatcgtggagcgtgccggtcatccgccacctcttcgctccgctgaaggaatattttgcttgtgtgtgataatagg

SEQ ID NO: 201 - DNA, 6697 bp, synthetic construct
  misc_feature 1..6697: note = V16 CDS
  source 1..6697: mol_type = other DNA
atggtccctgctgctaagagagtgaaactggatggatccgacaagaagtacagcatcggcctggccatcggcaccaactctgtgggctgggccgtgatcaccgacgagtacaaggtgcccagcaagaaattcaaggtgctgggcaacaccgaccggcacagcatcaagaagaacctgatcggcgccctgctgttcgacagcggagaaacagccgaggccacccggctgaagagaaccgccagaagaagatacaccagacggaagaaccggatctgctatctgcaagagatcttcagcaacgagatggccaaggtggacgacagcttcttccacagactggaagagtccttcctggtggaagaggataagaagcacgagcggcaccccatcttcggcaacatcgtggacgaggtggcctaccacgagaagtaccccaccatctaccacctgagaaagaaactggtggacagcaccgacaaggccgacctgcggctgatctatctggccctggcccacatgatcaagttccggggccacttcctgatcgagggcgacctgaaccccgacaacagcgacgtggacaagctgttcatccagctggtgcagacctacaaccagctgttcgaggaaaaccccatcaacgccagcggcgtggacgccaaggccatcctgtctgccagactgagcaagagcagacggctggaaaatctgatcgcccagctgcccggcgagaagaagaatggcctgttcggcaacctgattgccctgagcctgggcctgacccccaacttcaagagcaacttcgacctggccgaggatgccaaactgcagctgagcaaggacacctacgacgacgacctggacaacctgctggcccagatcggcgaccagtacgccgacctgtttctggccgccaagaacctgtccgacgccatcctgctgagcgacatcctgagagtgaacaccgagatcaccaaggcccccctgagcgcctctatgatcaagagatacgacgagcaccaccaggacctgaccctgctgaaagctctcgtgcggcagcagctgcctgagaagtacaaagagattttcttcgaccagagcaagaacggctacgccggctacatcgatggcggagccagccaggaagagttctacaagttcatcaagcccatcctggaaaagatggacggcaccgaggaactgctcgtgaagctgaacagagaggacctgctgcggaagcagcggaccttcgacaacggcagcatcccccaccagatccacctgggagagctgcacgccattctgcggcggcaggaagatttttacccattcctgaaggacaaccgggaaaagatcgagaagatcctgaccttccgcatcccctactacgtgggccctctggccaggggaaacagcagattcgcctggatgaccagaaagagcgaggaaaccatcaccccctggaacttcgaggaagtggtggacaagggcgccagcgcccagagcttcatcgagcggatgaccaacttcgataagaacctgcccaacgagaaggtgctgcccaagcacagcctgctgtacgagtacttcaccgtgtacaacgagctgaccaaagtgaaatacgtgaccgagggaatgagaaagcccgccttcctgagcggcgagcagaaaaaagccatcgtggacctgctgttcaagaccaaccggaaagtgaccgtgaagcagctgaaagaggactacttcaagaaaatcgagtgcttcgactccgtggaaatctccggcgtggaagatcggttcaacgcctccctgggcacataccacgatctgctgaaaattatcaaggacaaggacttcctggacaatgaggaaaacgaggacattctggaagatatcgtgctgaccctgacactgtttgaggacagagagatgatcgaggaacggctgaaaacctatgcccacctgttcgacgacaaagtgatgaagcagctgaagcggcggagatacaccggctggggcaggctgagccggaagctgatcaacggcatccgggacaagcagtccggcaagacaatcctggatttcctgaagtccgacggcttcgccaacagaaacttcatgcagctgatccacgacgacagcctgacctttaaagaggacatccagaaagcccaggtgtccggccagggcgatagcctgcacgagcacattgccaatctggccggcagccccgccattaagaagggcatcctgcagacagtgaaggtggtggacgagctcgtgaaagtgatgggccggcacaagcccgagaacatcgtgatcgaaatggccagagagaaccagaccacccagaagggacagaagaacagccgcgagagaatgaagcggatcgaagagggcatcaaagagctgggcagccagatcctgaaagaacaccccgtggaaaacacccagctgcagaacgagaagctgtacctgtactacctgcagaatgggcgggatatgtacgtggaccaggaactggacatcaaccggctgtccgactacgatgtggacgctatcgtgcctcagagctttctgaaggacgactccatcgataacaaagtgctgactcggagcgacaagaaccggggcaagagcgacaacgtgccctccgaagaggtcgtgaagaagatgaagaactactggcgccagctgctgaatgccaagctgattacccagaggaagttcgacaatctgaccaaggccgagagaggcggcctgagcgaactggataaggccggcttcatcaagagacagctggtggaaacccggcagatcacaaagcacgtggcacagatcctggactcccggatgaacactaagtacgacgagaacgacaaactgatccgggaagtgaaagtgatcaccctgaagtccaagctggtgtccgatttccggaaggatttccagttttacaaagtgcgcgagatcaacaactaccaccacgcccacgacgcctacctgaacgccgtcgtgggaaccgccctgatcaaaaagtaccctaagctggaaagcgagttcgtgtacggcgactacaaggtgtacgacgtgcggaagatgatcgccaagagcgagcaggaaatcggcaaggctaccgccaagtacttcttctacagcaacatcatgaactttttcaagaccgagattaccctggccaacggcgagatccggaagcggcctctgatcgagacaaacggcgaaacaggcgagatcgtgtgggataagggccgggactttgccaccgtgcggaaagtgctgtctatgccccaagtgaatatcgtgaaaaagaccgaggtgcagacaggcggcttcagcaaagagtctatcctgcccaagaggaacagcgacaagctgatcgccagaaagaaggactgggaccctaagaagtacggcggcttcgacagccccaccgtggcctattctgtgctggtggtggccaaagtggaaaagggcaagtccaagaaactgaagagtgtgaaagagctgctggggatcaccatcatggaaagaagcagcttcgagaagaatcccatcgactttctggaagccaagggctacaaagaagtgaaaaaggacctgatcatcaagctgcctaagtactccctgttcgagctggaaaacggccggaagagaatgctggcctctgccggcgaactgcagaagggaaacgaactggccctgccctccaaatatgtgaacttcctgtacctggccagccactatgagaagctgaagggctcccccgaggataatgagcagaaacagctgtttgtggaacagcacaaacactacctggacgagatcatcgagcagatcagcgagttctccaagagagtgatcctggccgacgctaatctggacaaggtgctgagcgcctacaacaagcacagagacaagcctatcagagagcaggccgagaatatcatccacctgtttaccctgaccaatctgggagcccctgccgccttcaagtactttgacaccaccatcgaccggaagaggtacaccagcaccaaagaggtgctggacgccaccctgatccaccagagcatcaccggcctgtacgagacacggatcgacctgtctcagctgggaggcgacgcctatccctatgacgtgcccgattatgccagcctgggcagcggctcccccaagaaaaaacgcaaggtggaagatcctaagaaaaagcggaaagtggacggcggagggccgagctctggcgcacccccaccaagtggagggtctcctgccgggtccccaacatctactgaagaaggcaccagcgaatccgcaacgcccgagtcaggccctggtacctccacagaaccatctgaaggtagtgcgcctggttccccagctggaagccctacttccaccgaagaaggcacgtcaaccgaaccaagtgaaggatctgcccctgggaccagcactgaaccatctgagatgaacaattcccagggaagagtgaccttcgaggacgtgaccgtgaacttcacccaaggcgagtggcagagactgaaccccgagcagagaaacctgtaccgggacgtgatgctggaaaactacagcaacctggtgtccgtcggccagggcgagacaacaaagcctgacgtgatcctgcggctggaacagggcaaagagccttggctggaagaggaagaggtgctcggatctggcagagccgagaagaatggcgatatcggcggacagatctggaagccaaaggatgtgaaagagagtctcagcggcagcgagacccccggtaccagcgagggcggccctagcagcggcgcccctccccctagcggcggcagccctgccggatcccctacaagcaccgaagaaggcacaagcgagtccgctacccctgagtccggccctggcacctccacagagcctagcgagggatccgctcctggatcccctgccggaagccctacctccaccgaggagggcacaagcaccgagccttccgagggcagcgcccccggaacaagcaccgaacctagcgagagcgccacccccgagagcatgttcgaaaccgtgcctgtgtggaggagacagccagtccgggtgctgtccctttttgaagacatcaagaaagagctgacgagtttgggctttttggaaagtggttctgacccgggacaactgaagcatgtggttgatgtcacagacacagtgaggaaggatgtggaggagtggggacccttcgatcttgtgtacggcgccacacctcccctgggccacacctgtgaccgtcctcccagctggtacctgttccagttccaccggctcctgcagtacgcacggcccaagccaggcagccccaggcccttcttctggatgttcgtggacaatctggtgctgaacaaggaagacctggacgtcgcatctcgcttcctggagatggagccagtcaccatcccagatgtccacggcggatccttgcagaatgctgtccgcgtgtggagcaacatcccagccataaggagcagcaggcactgggctctggtttcggaagaagaattgtccctgctggcccagaacaagcagagctcgaagctcgcggccaagtggcccaccaagctggtgaagaactgctttctccccctaagagaatatttcaagtatttttcaacagaactcacttcctctttatctagcggcaatagtaacgctaacagccgcgggccgagcttcagcagcggcctggtgccgttgagcttgcgcggcagccatatgaaccatgaccaggaatttgaccccccaaaggtttacccacctgtgccagctgagaagaggaagcccatccgcgtgctgtctctctttgatgggattgctacagggctcctggtgctgaaggacctgggcatccaagtggaccgctacattgcctccgaggtgtgtgaggactccatcacggtgggcatggtgcggcaccagggaaagatcatgtacgtcggggacgtccgcagcgtcacacagaagcatatccaggagtggggcccattcgacctggtgattggaggcagtccctgcaatgacctctccattgtcaaccctgcccgcaagggactttatgagggtactggccgcctcttctttgagttctaccgcctcctgcatgatgcgcggcccaaggagggagatgatcgccccttcttctggctctttgagaatgtggtggccatgggcgttagtgacaagagggacatctcgcgatttcttgagtctaaccccgtgatgattgacgccaaagaagtgtctgctgcacacagggcccgttacttctggggtaaccttcctggcatgaacaggcctttggcatccactgtgaatgataagctggagctgcaagagtgtctggagcacggcagaatagccaagttcagcaaagtgaggaccattaccaccaggtcaaactctataaagcagggcaaagaccagcatttccccgtcttcatgaacgagaaggaggacatcctgtggtgcactgaaatggaaagggtgtttggcttccccgtccactacacagacgtctccaacatgagccgcttggcgaggcagagactgctgggccgatcgtggagcgtgccggtcatccgccacctcttcgctccgctgaaggaatattttgcttgtgtgtgataatagg

SEQ ID NO: 202 - DNA, 6496 bp, synthetic construct
  misc_feature 1..6496: note = V17 CDS
  source 1..6496: mol_type = other DNA
atgcctgctgctaagagagtgaaactggatggatccaaccatgaccaggaatttgaccccccaaaggtttacccacctgtgccagctgagaagaggaagcccatccgcgtgctgtctctctttgatgggattgctacagggctcctggtgctgaaggacctgggcatccaagtggaccgctacattgcctccgaggtgtgtgaggactccatcacggtgggcatggtgcggcaccagggaaagatcatgtacgtcggggacgtccgcagcgtcacacagaagcatatccaggagtggggcccattcgacctggtgattggaggcagtccctgcaatgacctctccattgtcaaccctgcccgcaagggactttatgagggtactggccgcctcttctttgagttctaccgcctcctgcatgatgcgcggcccaaggagggagatgatcgccccttcttctggctctttgagaatgtggtggccatgggcgttagtgacaagagggacatctcgcgatttcttgagtctaaccccgtgatgattgacgccaaagaagtgtctgctgcacacagggcccgttacttctggggtaaccttcctggcatgaacaggcctttggcatccactgtgaatgataagctggagctgcaagagtgtctggagcacggcagaatagccaagttcagcaaagtgaggaccattaccaccaggtcaaactctataaagcagggcaaagaccagcatttccccgtgttcatgaacgagaaggaggacatcctgtggtgcactgaaatggaaagggtgtttggcttccccgtccactacacagacgtctccaacatgagccgcttggcgaggcagagactgctgggccgatcgtggagcgtgccggtcatccgccacctcttcgctccgctgaaggaatattttgcttgtgtgtctagcggcaatagtaacgctaacagccgcgggccgagcttcagcagcggcctggtgccgttaagcttgcgcggcagccatatgggccctatggagatatacaagacagtgtctgcatggaagagacagccagtgcgggtactgagcctcttcagaaacatcgacaaggtactaaagagtttgggcttcttggaaagcggttctggttctgggggaggaacgctgaagtacgtggaagatgtcacaaatgtcgtgaggagagacgtggagaaatggggcccctttgacctggtgtacggctcgacgcagcccctaggcagctcttgtgatcgctgtcccggctggtacatgttccagttccaccggatcctgcagtatgcgctgcctcgccaggagagtcagcggcccttcttctggatattcatggacaatctgctgctgactgaggatgaccaagagacaactacccgcttccttcagacagaggctgtgaccctccaggatgtccgtggcagagactaccagaatgctatgcgggtgtggagcaacattccagggctgaagagcaagcatgcgcccctgaccccaaaggaagaagagtatctgcaagcccaagtcagaagcaggagcaagctggacgccccgaaagttgacctcctggtgaagaactgccttctcccgctgagagagtacttcaagtatttttctcaaaactcacttcctcttggagggccgagctctggcgcacccccaccaagtggagggtctcctgccgggtccccaacatctactgaagaaggcaccagcgaatccgcaacgcccgagtcaggccctggtacctccacagaaccatctgaaggtagtgcgcctggttccccagctggaagccctacttccaccgaagaaggcacgtcaaccgaaccaagtgaaggatctgcccctgggaccagcactgaaccatctgagccaaaaaagaagagaaaggtaatggacaagaagtacagcatcggcctggccatcggcaccaactctgtgggctgggccgtgatcaccgacgagtacaaggtgcccagcaagaaattcaaggtgctgggcaacaccgaccggcacagcatcaagaagaacctgatcggcgccctgctgttcgacagcggagaaacagccgaggccacccggctgaagagaaccgccagaagaagatacaccagacggaagaaccggatctgctatctgcaagagatcttcagcaacgagatggccaaggtggacgacagcttcttccacagactggaagagtccttcctggtggaagaggataagaagcacgagcggcaccccatcttcggcaacatcgtggacgaggtggcctaccacgagaagtaccccaccatctaccacctgagaaagaaactggtggacagcaccgacaaggccgacctgcggctgatctatctggccctggcccacatgatcaagttccggggccacttcctgatcgagggcgacctgaaccccgacaacagcgacgtggacaagctgttcatccagctggtgcagacctacaaccagctgttcgaggaaaaccccatcaacgccagcggcgtggacgccaaggccatcctgtctgccagactgagcaagagcagacggctggaaaatctgatcgcccagctgcccggcgagaagaagaatggcctgttcggcaacctgattgccctgagcctgggcctgacccccaacttcaagagcaacttcgacctggccgaggatgccaaactgcagctgagcaaggacacctacgacgacgacctggacaacctgctggcccagatcggcgaccagtacgccgacctgtttctggccgccaagaacctgtccgacgccatcctgctgagcgacatcctgagagtgaacaccgagatcaccaaggcccccctgagcgcctctatgatcaagagatacgacgagcaccaccaggacctgaccctgctgaaagctctcgtgcggcagcagctgcctgagaagtacaaagagattttcttcgaccagagcaagaacggctacgccggctacatcgatggcggagccagccaggaagagttctacaagttcatcaagcccatcctggaaaagatggacggcaccgaggaactgctcgtgaagctgaacagagaggacctgctgcggaagcagcggaccttcgacaacggcagcatcccccaccagatccacctgggagagctgcacgccattctgcggcggcaggaagatttttacccattcctgaaggacaaccgggaaaagatcgagaagatcctgaccttccgcatcccctactacgtgggccctctggccaggggaaacagcagattcgcctggatgaccagaaagagcgaggaaaccatcaccccctggaacttcgaggaagtggtggacaagggcgccagcgcccagagcttcatcgagcggatgaccaacttcgataagaacctgcccaacgagaaggtgctgcccaagcacagcctgctgtacgagtacttcaccgtgtacaacgagctgaccaaagtgaaatacgtgaccgagggaatgagaaagcccgccttcctgagcggcgagcagaaaaaagccatcgtggacctgctgttcaagaccaaccggaaagtgaccgtgaagcagctgaaagaggactacttcaagaaaatcgagtgcttcgactccgtggaaatctccggcgtggaagatcggttcaacgcctccctgggcacataccacgatctgctgaaaattatcaaggacaaggacttcctggacaatgaggaaaacgaggacattctggaagatatcgtgctgaccctgacactgtttgaggacagagagatgatcgaggaacggctgaaaacctatgcccacctgttcgacgacaaagtgatgaagcagctgaagcggcggagatacaccggctggggcaggctgagccggaagctgatcaacggcatccgggacaagcagtccggcaagacaatcctggatttcctgaagtccgacggcttcgccaacagaaacttcatgcagctgatccacgacgacagcctgacctttaaagaggacatccagaaagcccaggtgtccggccagggcgatagcctgcacgagcacattgccaatctggccggcagccccgccattaagaagggcatcctgcagacagtgaaggtggtggacgagctcgtgaaagtgatgggccggcacaagcccgagaacatcgtgatcgaaatggccagagagaaccagaccacccagaagggacagaagaacagccgcgagagaatgaagcggatcgaagagggcatcaaagagctgggcagccagatcctgaaagaacaccccgtggaaaacacccagctgcagaacgagaagctgtacctgtactacctgcagaatgggcgggatatgtacgtggaccaggaactggacatcaaccggctgtccgactacgatgtggacgctatcgtgcctcagagctttctgaaggacgactccatcgataacaaagtgctgactcggagcgacaagaaccggggcaagagcgacaacgtgccctccgaagaggtcgtgaagaagatgaagaactactggcgccagctgctgaatgccaagctgattacccagaggaagttcgacaatctgaccaaggccgagagaggcggcctgagcgaactggataaggccggcttcatcaagagacagctggtggaaacccggcagatcacaaagcacgtggcacagatcctggactcccggatgaacactaagtacgacgagaacgacaaactgatccgggaagtgaaagtgatcaccctgaagtccaagctggtgtccgatttccggaaggatttccagttttacaaagtgcgcgagatcaacaactaccaccacgcccacgacgcctacctgaacgccgtcgtgggaaccgccctgatcaaaaagtaccctaagctggaaagcgagttcgtgtacggcgactacaaggtgtacgacgtgcggaagatgatcgccaagagcgagcaggaaatcggcaaggctaccgccaagtacttcttctacagcaacatcatgaactttttcaagaccgagattaccctggccaacggcgagatccggaagcggcctctgatcgagacaaacggcgaaacaggcgagatcgtgtgggataagggccgggactttgccaccgtgcggaaagtgctgtctatgccccaagtgaatatcgtgaaaaagaccgaggtgcagacaggcggcttcagcaaagagtctatcctgcccaagaggaacagcgacaagctgatcgccagaaagaaggactgggaccctaagaagtacggcggcttcgacagccccaccgtggcctattctgtgctggtggtggccaaagtggaaaagggcaagtccaagaaactgaagagtgtgaaagagctgctggggatcaccatcatggaaagaagcagcttcgagaagaatcccatcgactttctggaagccaagggctacaaagaagtgaaaaaggacctgatcatcaagctgcctaagtactccctgttcgagctggaaaacggccggaagagaatgctggcctctgccggcgaactgcagaagggaaacgaactggccctgccctccaaatatgtgaacttcctgtacctggccagccactatgagaagctgaagggctcccccgaggataatgagcagaaacagctgtttgtggaacagcacaaacactacctggacgagatcatcgagcagatcagcgagttctccaagagagtgatcctggccgacgctaatctggacaaggtgctgagcgcctacaacaagcacagagacaagcctatcagagagcaggccgagaatatcatccacctgtttaccctgaccaatctgggagcccctgccgccttcaagtactttgacaccaccatcgaccggaagaggtacaccagcaccaaagaggtgctggacgccaccctgatccaccagagcatcaccggcctgtacgagacacggatcgacctgtctcagctgggaggcgacgcctatccctatgacgtgcccgattatgccagcctgggcagcggctcccccaagaaaaaacgcaaggtggaagatcctaagaaaaagcggaaagtggacggcagcggcagcgagacccccggtaccagcgagagcgccacccccgagagcatgaacaattcccagggaagagtgaccttcgaggatgtcactgtgaacttcacccagggggagtggcagcggctgaatcccgaacagagaaacttgtacagggatgtgatgctggagaattacagcaaccttgtctctgtgggacaaggggaaaccaccaaacccgatgtgatcttgaggttggaacaaggaaaggagccatggttggaggaagaggaagtgctgggaagtggccgtgcagaaaaaaatggggacattggagggcagatttggaagccaaaggatgtgaaagagagtctcctcgagtgataatagg

SEQ ID NO: 203 - DNA, 6333 bp, synthetic construct
  misc_feature 1..6333: note = V18 CDS
  source 1..6333: mol_type = other DNA
atgcctgctgctaagagagtgaaactggatggatccaaccatgaccaggaatttgaccccccaaaggtttacccacctgtgccagctgagaagaggaagcccatccgcgtgctgtctctctttgatgggattgctacagggctcctggtgctgaaggacctgggcatccaagtggaccgctacattgcctccgaggtgtgtgaggactccatcacggtgggcatggtgcggcaccagggaaagatcatgtacgtcggggacgtccgcagcgtcacacagaagcatatccaggagtggggcccattcgacctggtgattggaggcagtccctgcaatgacctctccattgtcaaccctgcccgcaagggactttatgagggtactggccgcctcttctttgagttctaccgcctcctgcatgatgcgcggcccaaggagggagatgatcgccccttcttctggctctttgagaatgtggtggccatgggcgttagtgacaagagggacatctcgcgatttcttgagtctaaccccgtgatgattgacgccaaagaagtgtctgctgcacacagggcccgttacttctggggtaaccttcctggcatgaacaggcctttggcatccactgtgaatgataagctggagctgcaagagtgtctggagcacggcagaatagccaagttcagcaaagtgaggaccattaccaccaggtcaaactctataaagcagggcaaagaccagcatttccccgtgttcatgaacgagaaggaggacatcctgtggtgcactgaaatggaaagggtgtttggcttccccgtccactacacagacgtctccaacatgagccgcttggcgaggcagagactgctgggccgatcgtggagcgtgccggtcatccgccacctcttcgctccgctgaaggaatattttgcttgtgtgtctagcggcaatagtaacgctaacagccgcgggccgagcttcagcagcggcctggtgccgttaagcttgcgcggcagccatatgttcgaaaccgtgcctgtgtggaggagacagccagtccgggtgctgtccctttttgaagacatcaagaaagagctgacgagtttgggctttttggaaagtggttctgacccgggacaactgaagcatgtggttgatgtcacagacacagtgaggaaggatgtggaggagtggggacccttcgatcttgtgtacggcgccacacctcccctgggccacacctgtgaccgtcctcccagctggtacctgttccagttccaccggctcctgcagtacgcacggcccaagccaggcagccccaggcccttcttctggatgttcgtggacaatctggtgctgaacaaggaagacctggacgtcgcatctcgcttcctggagatggagccagtcaccatcccagatgtccacggcggatccttgcagaatgctgtccgcgtgtggagcaacatcccagccataaggagcagcaggcactgggctctggtttcggaagaagaattgtccctgctggcccagaacaagcagagctcgaagctcgcggccaagtggcccaccaagctggtgaagaactgctttctccccctaagagaatatttcaagtatttttcaggagggccgagctctggcgcacccccaccaagtggagggtctcctgccgggtccccaacatctactgaagaaggcaccagcgaatccgcaacgcccgagtcaggccctggtacctccacagaaccatctgaaggtagtgcgcctggttccccagctggaagccctacttccaccgaagaaggcacgtcaaccgaaccaagtgaaggatctgcccctgggaccagcactgaaccatctgagccaaaaaagaagagaaaggtaatggacaagaagtacagcatcggcctggccatcggcaccaactctgtgggctgggccgtgatcaccgacgagtacaaggtgcccagcaagaaattcaaggtgctgggcaacaccgaccggcacagcatcaagaagaacctgatcggcgccctgctgttcgacagcggagaaacagccgaggccacccggctgaagagaaccgccagaagaagatacaccagacggaagaaccggatctgctatctgcaagagatcttcagcaacgagatggccaaggtggacgacagcttcttccacagactggaagagtccttcctggtggaagaggataagaagcacgagcggcaccccatcttcggcaacatcgtggacgaggtggcctaccacgagaagtaccccaccatctaccacctgagaaagaaactggtggacagcaccgacaaggccgacctgcggctgatctatctggccctggcccacatgatcaagttccggggccacttcctgatcgagggcgacctgaaccccgacaacagcgacgtggacaagctgttcatccagctggtgcagacctacaaccagctgttcgaggaaaaccccatcaacgccagcggcgtggacgccaaggccatcctgtctgccagactgagcaagagcagacggctggaaaatctgatcgcccagctgcccggcgagaagaagaatggcctgttcggcaacctgattgccctgagcctgggcctgacccccaacttcaagagcaacttcgacctggccgaggatgccaaactgcagctgagcaaggacacctacgacgacgacctggacaacctgctggcccagatcggcgaccagtacgccgacctgtttctggccgccaagaacctgtccgacgccatcctgctgagcgacatcctgagagtgaacaccgagatcaccaaggcccccctgagcgcctctatgatcaagagatacgacgagcaccaccaggacctgaccctgctgaaagctctcgtgcggcagcagctgcctgagaagtacaaagagattttcttcgaccagagcaagaacggctacgccggctacatcgatggcggagccagccaggaagagttctacaagttcatcaagcccatcctggaaaagatggacggcaccgaggaactgctcgtgaagctgaacagagaggacctgctgcggaagcagcggaccttcgacaacggcagcatcccccaccagatccacctgggagagctgcacgccattctgcggcggcaggaagatttttacccattcctgaaggacaaccgggaaaagatcgagaagatcctgaccttccgcatcccctactacgtgggccctctggccaggggaaacagcagattcgcctggatgaccagaaagagcgaggaaaccatcaccccctggaacttcgaggaagtggtggacaagggcgccagcgcccagagcttcatcgagcggatgaccaacttcgataagaacctgcccaacgagaaggtgctgcccaagcacagcctgctgtacgagtacttcaccgtgtacaacgagctgaccaaagtgaaatacgtgaccgagggaatgagaaagcccgccttcctgagcggcgagcagaaaaaagccatcgtggacctgctgttcaagaccaaccggaaagtgaccgtgaagcagctgaaagaggactacttcaagaaaatcgagtgcttcgactccgtggaaatctccggcgtggaagatcggttcaacgcctccctgggcacataccacgatctgctgaaaattatcaaggacaaggacttcctggacaatgaggaaaacgaggacattctggaagatatcgtgctgaccctgacactgtttgaggacagagagatgatcgaggaacggctgaaaacctatgcccacctgttcgacgacaaagtgatgaagcagctgaagcggcggagatacaccggctggggcaggctgagccggaagctgatcaacggcatccgggacaagcagtccggcaagacaatcctggatttcctgaagtccgacggcttcgccaacagaaacttcatgcagctgatccacgacgacagcctgacctttaaagaggacatccagaaagcccaggtgtccggccagggcgatagcctgcacgagcacattgccaatctggccggcagccccgccattaagaagggcatcctgcagacagtgaaggtggtggacgagctcgtgaaagtgatgggccggcacaagcccgagaacatcgtgatcgaaatggccagagagaaccagaccacccagaagggacagaagaacagccgcgagagaatgaagcggatcgaagagggcatcaaagagctgggcagccagatcctgaaagaacaccccgtggaaaacacccagctgcagaacgagaagctgtacctgtactacctgcagaatgggcgggatatgtacgtggaccaggaactggacatcaaccggctgtccgactacgatgtggacgctatcgtgcctcagagctttctgaaggacgactccatcgataacaaagtgctgactcggagcgacaagaaccggggcaagagcgacaacgtgccctccgaagaggtcgtgaagaagatgaagaactactggcgccagctgctgaatgccaagctgattacccagaggaagttcgacaatctgaccaaggccgagagaggcggcctgagcgaactggataaggccggcttcatcaagagacagctggtggaaacccggcagatcacaaagcacgtggcacagatcctggactcccggatgaacactaagtacgacgagaacgacaaactgatccgggaagtgaaagtgatcaccctgaagtccaagctggtgtccgatttccggaaggatttccagttttacaaagtgcgcgagatcaacaactaccaccacgcccacgacgcctacctgaacgccgtcgtgggaaccgccctgatcaaaaagtaccctaagctggaaagcgagttcgtgtacggcgactacaaggtgtacgacgtgcggaagatgatcgccaagagcgagcaggaaatcggcaaggctaccgccaagtacttcttctacagcaacatcatgaactttttcaagaccgagattaccctggccaacggcgagatccggaagcggcctctgatcgagacaaacggcgaaacaggcgagatcgtgtgggataagggccgggactttgccaccgtgcggaaagtgctgtctatgccccaagtgaatatcgtgaaaaagaccgaggtgcagacaggcggcttcagcaaagagtctatcctgcccaagaggaacagcgacaagctgatcgccagaaagaaggactgggaccctaagaagtacggcggcttcgacagccccaccgtggcctattctgtgctggtggtggccaaagtggaaaagggcaagtccaagaaactgaagagtgtgaaagagctgctggggatcaccatcatggaaagaagcagcttcgagaagaatcccatcgactttctggaagccaagggctacaaagaagtgaaaaaggacctgatcatcaagctgcctaagtactccctgttcgagctggaaaacggccggaagagaatgctggcctctgccggcgaactgcagaagggaaacgaactggccctgccctccaaatatgtgaacttcctgtacctggccagccactatgagaagctgaagggctcccccgaggataatgagcagaaacagctgtttgtggaacagcacaaacactacctggacgagatcatcgagcagatcagcgagttctccaagagagtgatcctggccgacgctaatctggacaaggtgctgagcgcctacaacaagcacagagacaagcctatcagagagcaggccgagaatatcatccacctgtttaccctgaccaatctgggagcccctgccgccttcaagtactttgacaccaccatcgaccggaagaggtacaccagcaccaaagaggtgctggacgccaccctgatccaccagagcatcaccggcctgtacgagacacggatcgacctgtctcagctgggaggcgacgcctatccctatgacgtgcccgattatgccagcctgggcagcggctcccccaagaaaaaacgcaaggtggaagatcctaagaaaaagcggaaagtggacggcagcggcagcgagacccccggtaccagcgagagcgccacccccgagagccggacactggtgaccttcaaggatgtatttgtggacttcaccagggaggagtggaagctgctggacactgctcagcagatcgtgtacagaaatgtgatgctggagaactataagaacctggtttccttgggttatcagcttactaagccagatgtgatcctccggttggagaagggagaagagccctga

SEQ ID NO: 204 - DNA, 6384 bp, synthetic construct
  misc_feature 1..6384: note = V19 CDS
  source 1..6384: mol_type = other DNA
atgcctgctgctaagagagtgaaactggatggatccaaccatgaccaggaatttgaccccccaaaggtttacccacctgtgccagctgagaagaggaagcccatccgcgtgctgtctctctttgatgggattgctacagggctcctggtgctgaaggacctgggcatccaagtggaccgctacattgcctccgaggtgtgtgaggactccatcacggtgggcatggtgcggcaccagggaaagatcatgtacgtcggggacgtccgcagcgtcacacagaagcatatccaggagtggggcccattcgacctggtgattggaggcagtccctgcaatgacctctccattgtcaaccctgcccgcaagggactttatgagggtactggccgcctcttctttgagttctaccgcctcctgcatgatgcgcggcccaaggagggagatgatcgccccttcttctggctctttgagaatgtggtggccatgggcgttagtgacaagagggacatctcgcgatttcttgagtctaaccccgtgatgattgacgccaaagaagtgtctgctgcacacagggcccgttacttctggggtaaccttcctggcatgaacaggcctttggcatccactgtgaatgataagctggagctgcaagagtgtctggagcacggcagaatagccaagttcagcaaagtgaggaccattaccaccaggtcaaactctataaagcagggcaaagaccagcatttccccgtgttcatgaacgagaaggaggacatcctgtggtgcactgaaatggaaagggtgtttggcttccccgtccactacacagacgtctccaacatgagccgcttggcgaggcagagactgctgggccgatcgtggagcgtgccggtcatccgccacctcttcgctccgctgaaggaatattttgcttgtgtgtctagcggcaatagtaacgctaacagccgcgggccgagcttcagcagcggcctggtgccgttaagcttgcgcggcagccatatgggccctatggagatatacaagacagtgtctgcatggaagagacagccagtgcgggtactgagcctcttcagaaacatcgacaaggtactaaagagtttgggcttcttggaaagcggttctggttctgggggaggaacgctgaagtacgtggaagatgtcacaaatgtcgtgaggagagacgtggagaaatggggcccctttgacctggtgtacggctcgacgcagcccctaggcagctcttgtgatcgctgtcccggctggtacatgttccagttccaccggatcctgcagtatgcgctgcctcgccaggagagtcagcggcccttcttctggatattcatggacaatctgctgctgactgaggatgaccaagagacaactacccgcttccttcagacagaggctgtgaccctccaggatgtccgtggcagagactaccagaatgctatgcgggtgtggagcaacattccagggctgaagagcaagcatgcgcccctgaccccaaaggaagaagagtatctgcaagcccaagtcagaagcaggagcaagctggacgccccgaaagttgacctcctggtgaagaactgccttctcccgctgagagagtacttcaagtatttttctcaaaactcacttcctcttgacggcagcggcagcgagacccccggtaccagcgagagcgccacccccgagagccggacactggtgaccttcaaggatgtatttgtggacttcaccagggaggagtggaagctgctggacactgctcagcagatcgtgtacagaaatgtgatgctggagaactataagaacctggtttccttgggttatcagcttactaagccagatgtgatcctccggttggagaagggagaagagcccggagggccgagctctggcgcacccccaccaagtggagggtctcctgccgggtccccaacatctactgaagaaggcaccagcgaatccgcaacgcccgagtcaggccctggtacctccacagaaccatctgaaggtagtgcgcctggttccccagctggaagccctacttccaccgaagaaggcacgtcaaccgaaccaagtgaaggatctgcccctgggaccagcactgaaccatctgagccaaaaaagaagagaaaggtaatggacaagaagtacagcatcggcctggccatcggcaccaactctgtgggctgggccgtgatcaccgacgagtacaaggtgcccagcaagaaattcaaggtgctgggcaacaccgaccggcacagcatcaagaagaacctgatcggcgccctgctgttcgacagcggagaaacagccgaggccacccggctgaagagaaccgccagaagaagatacaccagacggaagaaccggatctgctatctgcaagagatcttcagcaacgagatggccaaggtggacgacagcttcttccacagactggaagagtccttcctggtggaagaggataagaagcacgagcggcaccccatcttcggcaacatcgtggacgaggtggcctaccacgagaagtaccccaccatctaccacctgagaaagaaactggtggacagcaccgacaaggccgacctgcggctgatctatctggccctggcccacatgatcaagttccggggccacttcctgatcgagggcgacctgaaccccgacaacagcgacgtggacaagctgttcatccagctggtgcagacctacaaccagctgttcgaggaaaaccccatcaacgccagcggcgtggacgccaaggccatcctgtctgccagactgagcaagagcagacggctggaaaatctgatcgcccagctgcccggcgagaagaagaatggcctgttcggcaacctgattgccctgagcctgggcctgacccccaacttcaagagcaacttcgacctggccgaggatgccaaactgcagctgagcaaggacacctacgacgacgacctggacaacctgctggcccagatcggcgaccagtacgccgacctgtttctggccgccaagaacctgtccgacgccatcctgctgagcgacatcctgagagtgaacaccgagatcaccaaggcccccctgagcgcctctatgatcaagagatacgacgagcaccaccaggacctgaccctgctgaaagctctcgtgcggcagcagctgcctgagaagtacaaagagattttcttcgaccagagcaagaacggctacgccggctacatcgatggcggagccagccaggaagagttctacaagttcatcaagcccatcctggaaaagatggacggcaccgaggaactgctcgtgaagctgaacagagaggacctgctgcggaagcagcggaccttcgacaacggcagcatcccccaccagatccacctgggagagctgcacgccattctgcggcggcaggaagatttttacccattcctgaaggacaaccgggaaaagatcgagaagatcctgaccttccgcatcccctactacgtgggccctctggccaggggaaacagcagattcgcctggatgaccagaaagagcgaggaaaccatcaccccctggaacttcgaggaagtggtggacaagggcgccagcgcccagagcttcatcgagcggatgaccaacttcgataagaacctgcccaacgagaaggtgctgcccaagcacagcctgctgtacgagtacttcaccgtgtacaacgagctgaccaaagtgaaatacgtgaccgagggaatgagaaagcccgccttcctgagcggcgagcagaaaaaagccatcgtggacctgctgttcaagaccaaccggaaagtgaccgtgaagcagctgaaagaggactacttcaagaaaatcgagtgcttcgactccgtggaaatctccggcgtggaagatcggttcaacgcctccctgggcacataccacgatctgctgaaaattatcaaggacaaggacttcctggacaatgaggaaaacgaggacattctggaagatatcgtgctgaccctgacactgtttgaggacagagagatgatcgaggaacggctgaaaacctatgcccacctgttcgacgacaaagtgatgaagcagctgaagcggcggagatacaccggctggggcaggctgagccggaagctgatcaacggcatccgggacaagcagtccggcaagacaatcctggatttcctgaagtccgacggcttcgccaacagaaacttcatgcagctgatccacgacgacagcctgacctttaaagaggacatccagaaagcccaggtgtccggccagggcgatagcctgcacgagcacattgccaatctggccggcagccccgccattaagaagggcatcctgcagacagtgaaggtggtggacgagctcgtgaaagtgatgggccggcacaagcccgagaacatcgtgatcgaaatggccagagagaaccagaccacccagaagggacagaagaacagccgcgagagaatgaagcggatcgaagagggcatcaaagagctgggcagccagatcctgaaagaacaccccgtggaaaacacccagctgcagaacgagaagctgtacctgtactacctgcagaatgggcgggatatgtacgtggaccaggaactggacatcaaccggctgtccgactacgatgtggacgctatcgtgcctcagagctttctgaaggacgactccatcgataacaaagtgctgactcggagcgacaagaaccggggcaagagcgacaacgtgccctccgaagaggtcgtgaagaagatgaagaactactggcgccagctgctgaatgccaagctgattacccagaggaagttcgacaatctgaccaaggccgagagaggcggcctgagcgaactggataaggccggcttcatcaagagacagctggtggaaacccggcagatcacaaagcacgtggcacagatcctggactcccggatgaacactaagtacgacgagaacgacaaactgatccgggaagtgaaagtgatcaccctgaagtccaagctggtgtccgatttccggaaggatttccagttttacaaagtgcgcgagatcaacaactaccaccacgcccacgacgcctacctgaacgccgtcgtgggaaccgccctgatcaaaaagtaccctaagctggaaagcgagttcgtgtacggcgactacaaggtgtacgacgtgcggaagatgatcgccaagagcgagcaggaaatcggcaaggctaccgccaagtacttcttctacagcaacatcatgaactttttcaagaccgagattaccctggccaacggcgagatccggaagcggcctctgatcgagacaaacggcgaaacaggcgagatcgtgtgggataagggccgggactttgccaccgtgcggaaagtgctgtctatgccccaagtgaatatcgtgaaaaagaccgaggtgcagacaggcggcttcagcaaagagtctatcctgcccaagaggaacagcgacaagctgatcgccagaaagaaggactgggaccctaagaagtacggcggcttcgacagccccaccgtggcctattctgtgctggtggtggccaaagtggaaaagggcaagtccaagaaactgaagagtgtgaaagagctgctggggatcaccatcatggaaagaagcagcttcgagaagaatcccatcgactttctggaagccaagggctacaaagaagtgaaaaaggacctgatcatcaagctgcctaagtactccctgttcgagctggaaaacggccggaagagaatgctggcctctgccggcgaactgcagaagggaaacgaactggccctgccctccaaatatgtgaacttcctgtacctggccagccactatgagaagctgaagggctcccccgaggataatgagcagaaacagctgtttgtggaacagcacaaacactacctggacgagatcatcgagcagatcagcgagttctccaagagagtgatcctggccgacgctaatctggacaaggtgctgagcgcctacaacaagcacagagacaagcctatcagagagcaggccgagaatatcatccacctgtttaccctgaccaatctgggagcccctgccgccttcaagtactttgacaccaccatcgaccggaagaggtacaccagcaccaaagaggtgctggacgccaccctgatccaccagagcatcaccggcctgtacgagacacggatcgacctgtctcagctgggaggcgacgcctatccctatgacgtgcccgattatgccagcctgggcagcggctcccccaagaaaaaacgcaaggtggaagatcctaagaaaaagcggaaagtggacggcctcgagtaatga

SEQ ID NO: 205 - DNA, 6429 bp, synthetic construct
  misc_feature 1..6429: note = V20 CDS
  source 1..6429: mol_type = other DNA
atgaaccatgaccaggaatttgaccccccaaaggtttacccacctgtgccagctgagaagaggaagcccatccgcgtgctgtctctctttgatgggattgctacagggctcctggtgctgaaggacctgggcatccaagtggaccgctacattgcctccgaggtgtgtgaggactccatcacggtgggcatggtgcggcaccagggaaagatcatgtacgtcggggacgtccgcagcgtcacacagaagcatatccaggagtggggcccattcgacctggtgattggaggcagtccctgcaatgacctctccattgtcaaccctgcccgcaagggactttatgagggtactggccgcctcttctttgagttctaccgcctcctgcatgatgcgcggcccaaggagggagatgatcgccccttcttctggctctttgagaatgtggtggccatgggcgttagtgacaagagggacatctcgcgatttcttgagtctaaccccgtgatgattgacgccaaagaagtgtctgctgcacacagggcccgttacttctggggtaaccttcctggcatgaacaggcctttggcatccactgtgaatgataagctggagctgcaagagtgtctggagcacggcagaatagccaagttcagcaaagtgaggaccattaccaccaggtcaaactctataaagcagggcaaagaccagcatttccccgtcttcatgaacgagaaggaggacatcctgtggtgcactgaaatggaaagggtgtttggcttccccgtccactacacagacgtctccaacatgagccgcttggcgaggcagagactgctgggccgatcgtggagcgtgccggtcatccgccacctcttcgctccgctgaaggaatattttgcttgtgtgtctagcggcaatagtaacgctaacagccgcgggccgagcttcagcagcggcctggtgccgttaagcttgcgcggcagccatatgttcgaaaccgtgcctgtgtggaggagacagccagtccgggtgctgtccctttttgaagacatcaagaaagagctgacgagtttgggctttttggaaagtggttctgacccgggacaactgaagcatgtggttgatgtcacagacacagtgaggaaggatgtggaggagtggggacccttcgatcttgtgtacggcgccacacctcccctgggccacacctgtgaccgtcctcccagctggtacctgttccagttccaccggctcctgcagtacgcacggcccaagccaggcagccccaggcccttcttctggatgttcgtggacaatctggtgctgaacaaggaagacctggacgtcgcatctcgcttcctggagatggagccagtcaccatcccagatgtccacggcggatccttgcagaatgctgtccgcgtgtggagcaacatcccagccataaggagcagcaggcactgggctctggtttcggaagaagaattgtccctgctggcccagaacaagcagagctcgaagctcgcggccaagtggcccaccaagctggtgaagaactgctttctccccctaagagaatatttcaagtatttttcagacggcagcggcagcgagacccccggtaccagcgagagcgccacccccgagagcatgaacaattcccagggaagagtgaccttcgaggatgtcactgtgaacttcacccagggggagtggcagcggctgaatcccgaacagagaaacttgtacagggatgtgatgctggagaattacagcaaccttgtctctgtgggacaaggggaaaccaccaaacccgatgtgatcttgaggttggaacaaggaaaggagccatggttggaggaagaggaagtgctgggaagtggccgtgcagaaaaaaatggggacattggagggcagatttggaagccaaaggatgtgaaagagagtctcggagggccgagctctggcgcacccccaccaagtggagggtctcctgccgggtccccaacatctactgaagaaggcaccagcgaatccgcaacgcccgagtcaggccctggtacctccacagaaccatctgaaggtagtgcgcctggttccccagctggaagccctacttccaccgaagaaggcacgtcaaccgaaccaagtgaaggatctgcccctgggaccagcactgaaccatctgagccaaaaaagaagagaaaggtaatggacaagaagtacagcatcggcctggccatcggcaccaactctgtgggctgggccgtgatcaccgacgagtacaaggtgcccagcaagaaattcaaggtgctgggcaacaccgaccggcacagcatcaagaagaacctgatcggcgccctgctgttcgacagcggagaaacagccgaggccacccggctgaagagaaccgccagaagaagatacaccagacggaagaaccggatctgctatctgcaagagatcttcagcaacgagatggccaaggtggacgacagcttcttccacagactggaagagtccttcctggtggaagaggataagaagcacgagcggcaccccatcttcggcaacatcgtggacgaggtggcctaccacgagaagtaccccaccatctaccacctgagaaagaaactggtggacagcaccgacaaggccgacctgcggctgatctatctggccctggcccacatgatcaagttccggggccacttcctgatcgagggcgacctgaaccccgacaacagcgacgtggacaagctgttcatccagctggtgcagacctacaaccagctgttcgaggaaaaccccatcaacgccagcggcgtggacgccaaggccatcctgtctgccagactgagcaagagcagacggctggaaaatctgatcgcccagctgcccggcgagaagaagaatggcctgttcggcaacctgattgccctgagcctgggcctgacccccaacttcaagagcaacttcgacctggccgaggatgccaaactgcagctgagcaaggacacctacgacgacgacctggacaacctgctggcccagatcggcgaccagtacgccgacctgtttctggccgccaagaacctgtccgacgccatcctgctgagcgacatcctgagagtgaacaccgagatcaccaaggcccccctgagcgcctctatgatcaagagatacgacgagcaccaccaggacctgaccctgctgaaagctctcgtgcggcagcagctgcctgagaagtacaaagagattttcttcgaccagagcaagaacggctacgccggctacatcgatggcggagccagccaggaagagttctacaagttcatcaagcccatcctggaaaagatggacggcaccgaggaactgctcgtgaagctgaacagagaggacctgctgcggaagcagcggaccttcgacaacggcagcatcccccaccagatccacctgggagagctgcacgccattctgcggcggcaggaagatttttacccattcctgaaggacaaccgggaaaagatcgagaagatcctgaccttccgcatcccctactacgtgggccctctggccaggggaaacagcagattcgcctggatgaccagaaagagcgaggaaaccatcaccccctggaacttcgaggaagtggtggacaagggcgccagcgcccagagcttcatcgagcggatgaccaacttcgataagaacctgcccaacgagaaggtgctgcccaagcacagcctgctgtacgagtacttcaccgtgtacaacgagctgaccaaagtgaaatacgtgaccgagggaatgagaaagcccgccttcctgagcggcgagcagaaaaaagccatcgtggacctgctgttcaagaccaaccggaaagtgaccgtgaagcagctgaaagaggactacttcaagaaaatcgagtgcttcgactccgtggaaatctccggcgtggaagatcggttcaacgcctccctgggcacataccacgatctgctgaaaattatcaaggacaaggacttcctggacaatgaggaaaacgaggacattctggaagatatcgtgctgaccctgacactgtttgaggacagagagatgatcgaggaacggctgaaaacctatgcccacctgttcgacgacaaagtgatgaagcagctgaagcggcggagatacaccggctggggcaggctgagccggaagctgatcaacggcatccgggacaagcagtccggcaagacaatcctggatttcctgaagtccgacggcttcgccaacagaaacttcatgcagctgatccacgacgacagcctgacctttaaagaggacatccagaaagcccaggtgtccggccagggcgatagcctgcacgagcacattgccaatctggccggcagccccgccattaagaagggcatcctgcagacagtgaaggtggtggacgagctcgtgaaagtgatgggccggcacaagcccgagaacatcgtgatcgaaatggccagagagaaccagaccacccagaagggacagaagaacagccgcgagagaatgaagcggatcgaagagggcatcaaagagctgggcagccagatcctgaaagaacaccccgtggaaaacacccagctgcagaacgagaagctgtacctgtactacctgcagaatgggcgggatatgtacgtggaccaggaactggacatcaaccggctgtccgactacgatgtggacgctatcgtgcctcagagctttctgaaggacgactccatcgataacaaagtgctgactcggagcgacaagaaccggggcaagagcgacaacgtgccctccgaagaggtcgtgaagaagatgaagaactactggcgccagctgctgaatgccaagctgattacccagaggaagttcgacaatctgaccaaggccgagagaggcggcctgagcgaactggataaggccggcttcatcaagagacagctggtggaaacccggcagatcacaaagcacgtggcacagatcctggactcccggatgaacactaagtacgacgagaacgacaaactgatccgggaagtgaaagtgatcaccctgaagtccaagctggtgtccgatttccggaaggatttccagttttacaaagtgcgcgagatcaacaactaccaccacgcccacgacgcctacctgaacgccgtcgtgggaaccgccctgatcaaaaagtaccctaagctggaaagcgagttcgtgtacggcgactacaaggtgtacgacgtgcggaagatgatcgccaagagcgagcaggaaatcggcaaggctaccgccaagtacttcttctacagcaacatcatgaactttttcaagaccgagattaccctggccaacggcgagatccggaagcggcctctgatcgagacaaacggcgaaacaggcgagatcgtgtgggataagggccgggactttgccaccgtgcggaaagtgctgtctatgccccaagtgaatatcgtgaaaaagaccgaggtgcagacaggcggcttcagcaaagagtctatcctgcccaagaggaacagcgacaagctgatcgccagaaagaaggactgggaccctaagaagtacggcggcttcgacagccccaccgtggcctattctgtgctggtggtggccaaagtggaaaagggcaagtccaagaaactgaagagtgtgaaagagctgctggggatcaccatcatggaaagaagcagcttcgagaagaatcccatcgactttctggaagccaagggctacaaagaagtgaaaaaggacctgatcatcaagctgcctaagtactccctgttcgagctggaaaacggccggaagagaatgctggcctctgccggcgaactgcagaagggaaacgaactggccctgccctccaaatatgtgaacttcctgtacctggccagccactatgagaagctgaagggctcccccgaggataatgagcagaaacagctgtttgtggaacagcacaaacactacctggacgagatcatcgagcagatcagcgagttctccaagagagtgatcctggccgacgctaatctggacaaggtgctgagcgcctacaacaagcacagagacaagcctatcagagagcaggccgagaatatcatccacctgtttaccctgaccaatctgggagcccctgccgccttcaagtactttgacaccaccatcgaccggaagaggtacaccagcaccaaagaggtgctggacgccaccctgatccaccagagcatcaccggcctgtacgagacacggatcgacctgtctcagctgggaggcgacgcctatccctatgacgtgcccgattatgccagcctgggcagcggctcccccaagaaaaaacgcaaggtggaagatcctaagaaaaagcggaaagtggacggcctcgagtaatga

SEQ ID NO: 206 - DNA, 6423 bp, synthetic construct
  misc_feature 1..6423: note = V21 CDS
  source 1..6423: mol_type = other DNA
atgaacaattcccagggaagagtgaccttcgaggatgtcactgtgaacttcacccagggggagtggcagcggctgaatcccgaacagagaaacttgtacagggatgtgatgctggagaattacagcaaccttgtctctgtgggacaaggggaaaccaccaaacccgatgtgatcttgaggttggaacaaggaaaggagccatggttggaggaagaggaagtgctgggaagtggccgtgcagaaaaaaatggggacattggagggcagatttggaagccaaaggatgtgaaagagagtctcagcggcagcgagacccccggtaccagcgagagcgccacccccgagagcatgaaccatgaccaggaatttgaccccccaaaggtttacccacctgtgccagctgagaagaggaagcccatccgcgtgctgtctctctttgatgggattgctacagggctcctggtgctgaaggacctgggcatccaagtggaccgctacattgcctccgaggtgtgtgaggactccatcacggtgggcatggtgcggcaccagggaaagatcatgtacgtcggggacgtccgcagcgtcacacagaagcatatccaggagtggggcccattcgacctggtgattggaggcagtccctgcaatgacctctccattgtcaaccctgcccgcaagggactttatgagggtactggccgcctcttctttgagttctaccgcctcctgcatgatgcgcggcccaaggagggagatgatcgccccttcttctggctctttgagaatgtggtggccatgggcgttagtgacaagagggacatctcgcgatttcttgagtctaaccccgtgatgattgacgccaaagaagtgtctgctgcacacagggcccgttacttctggggtaaccttcctggcatgaacaggcctttggcatccactgtgaatgataagctggagctgcaagagtgtctggagcacggcagaatagccaagttcagcaaagtgaggaccattaccaccaggtcaaactctataaagcagggcaaagaccagcatttccccgtcttcatgaacgagaaggaggacatcctgtggtgcactgaaatggaaagggtgtttggcttccccgtccactacacagacgtctccaacatgagccgcttggcgaggcagagactgctgggccgatcgtggagcgtgccggtcatccgccacctcttcgctccgctgaaggaatattttgcttgtgtgtctagcggcaatagtaacgctaacagccgcgggccgagcttcagcagcggcctggtgccgttaagcttgcgcggcagccatatgttcgaaaccgtgcctgtgtggaggagacagccagtccgggtgctgtccctttttgaagacatcaagaaagagctgacgagtttgggctttttggaaagtggttctgacccgggacaactgaagcatgtggttgatgtcacagacacagtgaggaaggatgtggaggagtggggacccttcgatcttgtgtacggcgccacacctcccctgggccacacctgtgaccgtcctcccagctggtacctgttccagttccaccggctcctgcagtacgcacggcccaagccaggcagccccaggcccttcttctggatgttcgtggacaatctggtgctgaacaaggaagacctggacgtcgcatctcgcttcctggagatggagccagtcaccatcccagatgtccacggcggatccttgcagaatgctgtccgcgtgtggagcaacatcccagccataaggagcagcaggcactgggctctggtttcggaagaagaattgtccctgctggcccagaacaagcagagctcgaagctcgcggccaagtggcccaccaagctggtgaagaactgctttctccccctaagagaatatttcaagtatttttcaggagggccgagctctggcgcacccccaccaagtggagggtctcctgccgggtccccaacatctactgaagaaggcaccagcgaatccgcaacgcccgagtcaggccctggtacctccacagaaccatctgaaggtagtgcgcctggttccccagctggaagccctacttccaccgaagaaggcacgtcaaccgaaccaagtgaaggatctgcccctgggaccagcactgaaccatctgagccaaaaaagaagagaaaggtaatggacaagaagtacagcatcggcctggccatcggcaccaactctgtgggctgggccgtgatcaccgacgagtacaaggtgcccagcaagaaattcaaggtgctgggcaacaccgaccggcacagcatcaagaagaacctgatcggcgccctgctgttcgacagcggagaaacagccgaggccacccggctgaagagaaccgccagaagaagatacaccagacggaagaaccggatctgctatctgcaagagatcttcagcaacgagatggccaaggtggacgacagcttcttccacagactggaagagtccttcctggtggaagaggataagaagcacgagcggcaccccatcttcggcaacatcgtggacgaggtggcctaccacgagaagtaccccaccatctaccacctgagaaagaaactggtggacagcaccgacaaggccgacctgcggctgatctatctggccctggcccacatgatcaagttccggggccacttcctgatcgagggcgacctgaaccccgacaacagcgacgtggacaagctgttcatccagctggtgcagacctacaaccagctgttcgaggaaaaccccatcaacgccagcggcgtggacgccaaggccatcctgtctgccagactgagcaagagcagacggctggaaaatctgatcgcccagctgcccggcgagaagaagaatggcctgttcggcaacctgattgccctgagcctgggcctgacccccaacttcaagagcaacttcgacctggccgaggatgccaaactgcagctgagcaaggacacctacgacgacgacctggacaacctgctggcccagatcggcgaccagtacgccgacctgtttctggccgccaagaacctgtccgacgccatcctgctgagcgacatcctgagagtgaacaccgagatcaccaaggcccccctgagcgcctctatgatcaagagatacgacgagcaccaccaggacctgaccctgctgaaagctctcgtgcggcagcagctgcctgagaagtacaaagagattttcttcgaccagagcaagaacggctacgccggctacatcgatggcggagccagccaggaagagttctacaagttcatcaagcccatcctggaaaagatggacggcaccgaggaactgctcgtgaagctgaacagagaggacctgctgcggaagcagcggaccttcgacaacggcagcatcccccaccagatccacctgggagagctgcacgccattctgcggcggcaggaagatttttacccattcctgaaggacaaccgggaaaagatcgagaagatcctgaccttccgcatcccctactacgtgggccctctggccaggggaaacagcagattcgcctggatgaccagaaagagcgaggaaaccatcaccccctggaacttcgaggaagtggtggacaagggcgccagcgcccagagcttcatcgagcggatgaccaacttcgataagaacctgcccaacgagaaggtgctgcccaagcacagcctgctgtacgagtacttcaccgtgtacaacgagctgaccaaagtgaaatacgtgaccgagggaatgagaaagcccgccttcctgagcggcgagcagaaaaaagccatcgtggacctgctgttcaagaccaaccggaaagtgaccgtgaagcagctgaaagaggactacttcaagaaaatcgagtgcttcgactccgtggaaatctccggcgtggaagatcggttcaacgcctccctgggcacataccacgatctgctgaaaattatcaaggacaaggacttcctggacaatgaggaaaacgaggacattctggaagatatcgtgctgaccctgacactgtttgaggacagagagatgatcgaggaacggctgaaaacctatgcccacctgttcgacgacaaagtgatgaagcagctgaagcggcggagatacaccggctggggcaggctgagccggaagctgatcaacggcatccgggacaagcagtccggcaagacaatcctggatttcctgaagtccgacggcttcgccaacagaaacttcatgcagctgatccacgacgacagcctgacctttaaagaggacatccagaaagcccaggtgtccggccagggcgatagcctgcacgagcacattgccaatctggccggcagccccgccattaagaagggcatcctgcagacagtgaaggtggtggacgagctcgtgaaagtgatgggccggcacaagcccgagaacatcgtgatcgaaatggccagagagaaccagaccacccagaagggacagaagaacagccgcgagagaatgaagcggatcgaagagggcatcaaagagctgggcagccagatcctgaaagaacaccccgtggaaaacacccagctgcagaacgagaagctgtacctgtactacctgcagaatgggcgggatatgtacgtggaccaggaactggacatcaaccggctgtccgactacgatgtggacgctatcgtgcctcagagctttctgaaggacgactccatcgataacaaagtgctgactcggagcgacaagaaccggggcaagagcgacaacgtgccctccgaagaggtcgtgaagaagatgaagaactactggcgccagctgctgaatgccaagctgattacccagaggaagttcgacaatctgaccaaggccgagagaggcggcctgagcgaactggataaggccggcttcatcaagagacagctggtggaaacccggcagatcacaaagcacgtggcacagatcctggactcccggatgaacactaagtacgacgagaacgacaaactgatccgggaagtgaaagtgatcaccctgaagtccaagctggtgtccgatttccggaaggatttccagttttacaaagtgcgcgagatcaacaactaccaccacgcccacgacgcctacctgaacgccgtcgtgggaaccgccctgatcaaaaagtaccctaagctggaaagcgagttcgtgtacggcgactacaaggtgtacgacgtgcggaagatgatcgccaagagcgagcaggaaatcggcaaggctaccgccaagtacttcttctacagcaacatcatgaactttttcaagaccgagattaccctggccaacggcgagatccggaagcggcctctgatcgagacaaacggcgaaacaggcgagatcgtgtgggataagggccgggactttgccaccgtgcggaaagtgctgtctatgccccaagtgaatatcgtgaaaaagaccgaggtgcagacaggcggcttcagcaaagagtctatcctgcccaagaggaacagcgacaagctgatcgccagaaagaaggactgggaccctaagaagtacggcggcttcgacagccccaccgtggcctattctgtgctggtggtggccaaagtggaaaagggcaagtccaagaaactgaagagtgtgaaagagctgctggggatcaccatcatggaaagaagcagcttcgagaagaatcccatcgactttctggaagccaagggctacaaagaagtgaaaaaggacctgatcatcaagctgcctaagtactccctgttcgagctggaaaacggccggaagagaatgctggcctctgccggcgaactgcagaagggaaacgaactggccctgccctccaaatatgtgaacttcctgtacctggccagccactatgagaagctgaagggctcccccgaggataatgagcagaaacagctgtttgtggaacagcacaaacactacctggacgagatcatcgagcagatcagcgagttctccaagagagtgatcctggccgacgctaatctggacaaggtgctgagcgcctacaacaagcacagagacaagcctatcagagagcaggccgagaatatcatccacctgtttaccctgaccaatctgggagcccctgccgccttcaagtactttgacaccaccatcgaccggaagaggtacaccagcaccaaagaggtgctggacgccaccctgatccaccagagcatcaccggcctgtacgagacacggatcgacctgtctcagctgggaggcgacgcctatccctatgacgtgcccgattatgccagcctgggcagcggctcccccaagaaaaaacgcaaggtggaagatcctaagaaaaagcggaaagtggacggcctcgagtaatga

SEQ ID NO: 207 - DNA, 6348 bp, synthetic construct
  misc_feature 1..6348: note = V22 CDS
  source 1..6348: mol_type = other DNA
atgcggacactggtgaccttcaaggatgtatttgtggacttcaccagggaggagtggaagctgctggacactgctcagcagatcgtgtacagaaatgtgatgctggagaactataagaacctggtttccttgggttatcagcttactaagccagatgtgatcctccggttggagaagggagaagagcccagcggcagcgagacccccggtaccagcgagagcgccacccccgagagcatgaaccatgaccaggaatttgaccccccaaaggtttacccacctgtgccagctgagaagaggaagcccatccgcgtgctgtctctctttgatgggattgctacagggctcctggtgctgaaggacctgggcatccaagtggaccgctacattgcctccgaggtgtgtgaggactccatcacggtgggcatggtgcggcaccagggaaagatcatgtacgtcggggacgtccgcagcgtcacacagaagcatatccaggagtggggcccattcgacctggtgattggaggcagtccctgcaatgacctctccattgtcaaccctgcccgcaagggactttatgagggtactggccgcctcttctttgagttctaccgcctcctgcatgatgcgcggcccaaggagggagatgatcgccccttcttctggctctttgagaatgtggtggccatgggcgttagtgacaagagggacatctcgcgatttcttgagtctaaccccgtgatgattgacgccaaagaagtgtctgctgcacacagggcccgttacttctggggtaaccttcctggcatgaacaggcctttggcatccactgtgaatgataagctggagctgcaagagtgtctggagcacggcagaatagccaagttcagcaaagtgaggaccattaccaccaggtcaaactctataaagcagggcaaagaccagcatttccccgtcttcatgaacgagaaggaggacatcctgtggtgcactgaaatggaaagggtgtttggcttccccgtccactacacagacgtctccaacatgagccgcttggcgaggcagagactgctgggccgatcgtggagcgtgccggtcatccgccacctcttcgctccgctgaaggaatattttgcttgtgtgtctagcggcaatagtaacgctaacagccgcgggccgagcttcagcagcggcctggtgccgttaagcttgcgcggcagccatatgggccctatggagatatacaagacagtgtctgcatggaagagacagccagtgcgggtactgagcctcttcagaaacatcgacaaggtactaaagagtttgggcttcttggaaagcggttctggttctgggggaggaacgctgaagtacgtggaagatgtcacaaatgtcgtgaggagagacgtggagaaatggggcccctttgacctggtgtacggctcgacgcagcccctaggcagctcttgtgatcgctgtcccggctggtacatgttccagttccaccggatcctgcagtatgcgctgcctcgccaggagagtcagcggcccttcttctggatattcatggacaatctgctgctgactgaggatgaccaagagacaactacccgcttccttcagacagaggctgtgaccctccaggatgtccgtggcagagactaccagaatgctatgcgggtgtggagcaacattccagggctgaagagcaagcatgcgcccctgaccccaaaggaagaagagtatctgcaagcccaagtcagaagcaggagcaagctggacgccccgaaagttgacctcctggtgaagaactgccttctcccgctgagagagtacttcaagtatttttctcaaaactcacttcctcttggagggccgagctctggcgcacccccaccaagtggagggtctcctgccgggtccccaacatctactgaagaaggcaccagcgaatccgcaacgcccgagtcaggccctggtacctccacagaaccatctgaaggtagtgcgcctggttccccagctggaagccctacttccaccgaagaaggcacgtcaaccgaaccaagtgaaggatctgcccctgggaccagcactgaaccatctgagccaaaaaagaagagaaaggtaatggacaagaagtacagcatcggcctggccatcggcaccaactctgtgggctgggccgtgatcaccgacgagtacaaggtgcccagcaagaaattcaaggtgctgggcaacaccgaccggcacagcatcaagaagaacctgatcggcgccctgctgttcgacagcggagaaacagccgaggccacccggctgaagagaaccgccagaagaagatacaccagacggaagaaccggatctgctatctgcaagagatcttcagcaacgagatggccaaggtggacgacagcttcttccacagactggaagagtccttcctggtggaagaggataagaagcacgagcggcaccccatcttcggcaacatcgtggacgaggtggcctaccacgagaagtaccccaccatctaccacctgagaaagaaactggtggacagcaccgacaaggccgacctgcggctgatctatctggccctggcccacatgatcaagttccggggccacttcctgatcgagggcgacctgaaccccgacaacagcgacgtggacaagctgttcatccagctggtgcagacctacaaccagctgttcgaggaaaaccccatcaacgccagcggcgtggacgccaaggccatcctgtctgccagactgagcaagagcagacggctggaaaatctgatcgcccagctgcccggcgagaagaagaatggcctgttcggcaacctgattgccctgagcctgggcctgacccccaacttcaagagcaacttcgacctggccgaggatgccaaactgcagctgagcaaggacacctacgacgacgacctggacaacctgctggcccagatcggcgaccagtacgccgacctgtttctggccgccaagaacctgtccgacgccatcctgctgagcgacatcctgagagtgaacaccgagatcaccaaggcccccctgagcgcctctatgatcaagagatacgacgagcaccaccaggacctgaccctgctgaaagctctcgtgcggcagcagctgcctgagaagtacaaagagattttcttcgaccagagcaagaacggctacgccggctacatcgatggcggagccagccaggaagagttctacaagttcatcaagcccatcctggaaaagatggacggcaccgaggaactgctcgtgaagctgaacagagaggacctgctgcggaagcagcggaccttcgacaacggcagcatcccccaccagatccacctgggagagctgcacgccattctgcggcggcaggaagatttttacccattcctgaaggacaaccgggaaaagatcgagaagatcctgaccttccgcatcccctactacgtgggccctctggccaggggaaacagcagattcgcctggatgaccagaaagagcgaggaaaccatcaccccctggaacttcgaggaagtggtggacaagggcgccagcgcccagagcttcatcgagcggatgaccaacttcgataagaacctgcccaacgagaaggtgctgcccaagcacagcctgctgtacgagtacttcaccgtgtacaacgagctgaccaaagtgaaatacgtgaccgagggaatgagaaagcccgccttcctgagcggcgagcagaaaaaagccatcgtggacctgctgttcaagaccaaccggaaagtgaccgtgaagcagctgaaagaggactacttcaagaaaatcgagtgcttcgactccgtggaaatctccggcgtggaagatcggttcaacgcctccctgggcacataccacgatctgctgaaaattatcaaggacaaggacttcctggacaatgaggaaaacgaggacattctggaagatatcgtgctgaccctgacactgtttgaggacagagagatgatcgaggaacggctgaaaacctatgcccacctgttcgacgacaaagtgatgaagcagctgaagcggcggagatacaccggctggggcaggctgagccggaagctgatcaacggcatccgggacaagcagtccggcaagacaatcctggatttcctgaagtccgacggcttcgccaacagaaacttcatgcagctgatccacgacgacagcctgacctttaaagaggacatccagaaagcccaggtgtccggccagggcgatagcctgcacgagcacattgccaatctggccggcagccccgccattaagaagggcatcctgcagacagtgaaggtggtggacgagctcgtgaaagtgatgggccggcacaagcccgagaacatcgtgatcgaaatggccagagagaaccagaccacccagaagggacagaagaacagccgcgagagaatgaagcggatcgaagagggcatcaaagagctgggcagccagatcctgaaagaacaccccgtggaaaacacccagctgcagaacgagaagctgtacctgtactacctgcagaatgggcgggatatgtacgtggaccaggaactggacatcaaccggctgtccgactacgatgtggacgctatcgtgcctcagagctttctgaaggacgactccatcgataacaaagtgctgactcggagcgacaagaaccggggcaagagcgacaacgtgccctccgaagaggtcgtgaagaagatgaagaactactggcgccagctgctgaatgccaagctgattacccagaggaagttcgacaatctgaccaaggccgagagaggcggcctgagcgaactggataaggccggcttcatcaagagacagctggtggaaacccggcagatcacaaagcacgtggcacagatcctggactcccggatgaacactaagtacgacgagaacgacaaactgatccgggaagtgaaagtgatcaccctgaagtccaagctggtgtccgatttccggaaggatttccagttttacaaagtgcgcgagatcaacaactaccaccacgcccacgacgcctacctgaacgccgtcgtgggaaccgccctgatcaaaaagtaccctaagctggaaagcgagttcgtgtacggcgactacaaggtgtacgacgtgcggaagatgatcgccaagagcgagcaggaaatcggcaaggctaccgccaagtacttcttctacagcaacatcatgaactttttcaagaccgagattaccctggccaacggcgagatccggaagcggcctctgatcgagacaaacggcgaaacaggcgagatcgtgtgggataagggccgggactttgccaccgtgcggaaagtgctgtctatgccccaagtgaatatcgtgaaaaagaccgaggtgcagacaggcggcttcagcaaagagtctatcctgcccaagaggaacagcgacaagctgatcgccagaaagaaggactgggaccctaagaagtacggcggcttcgacagccccaccgtggcctattctgtgctggtggtggccaaagtggaaaagggcaagtccaagaaactgaagagtgtgaaagagctgctggggatcaccatcatggaaagaagcagcttcgagaagaatcccatcgactttctggaagccaagggctacaaagaagtgaaaaaggacctgatcatcaagctgcctaagtactccctgttcgagctggaaaacggccggaagagaatgctggcctctgccggcgaactgcagaagggaaacgaactggccctgccctccaaatatgtgaacttcctgtacctggccagccactatgagaagctgaagggctcccccgaggataatgagcagaaacagctgtttgtggaacagcacaaacactacctggacgagatcatcgagcagatcagcgagttctccaagagagtgatcctggccgacgctaatctggacaaggtgctgagcgcctacaacaagcacagagacaagcctatcagagagcaggccgagaatatcatccacctgtttaccctgaccaatctgggagcccctgccgccttcaagtactttgacaccaccatcgaccggaagaggtacaccagcaccaaagaggtgctggacgccaccctgatccaccagagcatcaccggcctgtacgagacacggatcgacctgtctcagctgggaggcgacgcctatccctatgacgtgcccgattatgccagcctgggcagcggctcccccaagaaaaaacgcaaggtggaagatcctaagaaaaagcggaaagtggacggcctcgagtaatga

SEQ ID NO: 208 - DNA, 6484 bp, synthetic construct
  misc_feature 1..6484: note = V23 CDS
  source 1..6484: mol_type = other DNA
atggtccctgctgctaagagagtgaaactggatggatccgacaagaagtacagcatcggcctggccatcggcaccaactctgtgggctgggccgtgatcaccgacgagtacaaggtgcccagcaagaaattcaaggtgctgggcaacaccgaccggcacagcatcaagaagaacctgatcggcgccctgctgttcgacagcggagaaacagccgaggccacccggctgaagagaaccgccagaagaagatacaccagacggaagaaccggatctgctatctgcaagagatcttcagcaacgagatggccaaggtggacgacagcttcttccacagactggaagagtccttcctggtggaagaggataagaagcacgagcggcaccccatcttcggcaacatcgtggacgaggtggcctaccacgagaagtaccccaccatctaccacctgagaaagaaactggtggacagcaccgacaaggccgacctgcggctgatctatctggccctggcccacatgatcaagttccggggccacttcctgatcgagggcgacctgaaccccgacaacagcgacgtggacaagctgttcatccagctggtgcagacctacaaccagctgttcgaggaaaaccccatcaacgccagcggcgtggacgccaaggccatcctgtctgccagactgagcaagagcagacggctggaaaatctgatcgcccagctgcccggcgagaagaagaatggcctgttcggcaacctgattgccctgagcctgggcctgacccccaacttcaagagcaacttcgacctggccgaggatgccaaactgcagctgagcaaggacacctacgacgacgacctggacaacctgctggcccagatcggcgaccagtacgccgacctgtttctggccgccaagaacctgtccgacgccatcctgctgagcgacatcctgagagtgaacaccgagatcaccaaggcccccctgagcgcctctatgatcaagagatacgacgagcaccaccaggacctgaccctgctgaaagctctcgtgcggcagcagctgcctgagaagtacaaagagattttcttcgaccagagcaagaacggctacgccggctacatcgatggcggagccagccaggaagagttctacaagttcatcaagcccatcctggaaaagatggacggcaccgaggaactgctcgtgaagctgaacagagaggacctgctgcggaagcagcggaccttcgacaacggcagcatcccccaccagatccacctgggagagctgcacgccattctgcggcggcaggaagatttttacccattcctgaaggacaaccgggaaaagatcgagaagatcctgaccttccgcatcccctactacgtgggccctctggccaggggaaacagcagattcgcctggatgaccagaaagagcgaggaaaccatcaccccctggaacttcgaggaagtggtggacaagggcgccagcgcccagagcttcatcgagcggatgaccaacttcgataagaacctgcccaacgagaaggtgctgcccaagcacagcctgctgtacgagtacttcaccgtgtacaacgagctgaccaaagtgaaatacgtgaccgagggaatgagaaagcccgccttcctgagcggcgagcagaaaaaagccatcgtggacctgctgttcaagaccaaccggaaagtgaccgtgaagcagctgaaagaggactacttcaagaaaatcgagtgcttcgactccgtggaaatctccggcgtggaagatcggttcaacgcctccctgggcacataccacgatctgctgaaaattatcaaggacaaggacttcctggacaatgaggaaaacgaggacattctggaagatatcgtgctgaccctgacactgtttgaggacagagagatgatcgaggaacggctgaaaacctatgcccacctgttcgacgacaaagtgatgaagcagctgaagcggcggagatacaccggctggggcaggctgagccggaagctgatcaacggcatccgggacaagcagtccggcaagacaatcctggatttcctgaagtccgacggcttcgccaacagaaacttcatgcagctgatccacgacgacagcctgacctttaaagaggacatccagaaagcccaggtgtccggccagggcgatagcctgcacgagcacattgccaatctggccggcagccccgccattaagaagggcatcctgcagacagtgaaggtggtggacgagctcgtgaaagtgatgggccggcacaagcccgagaacatcgtgatcgaaatggccagagagaaccagaccacccagaagggacagaagaacagccgcgagagaatgaagcggatcgaagagggcatcaaagagctgggcagccagatcctgaaagaacaccccgtggaaaacacccagctgcagaacgagaagctgtacctgtactacctgcagaatgggcgggatatgtacgtggaccaggaactggacatcaaccggctgtccgactacgatgtggacgctatcgtgcctcagagctttctgaaggacgactccatcgataacaaagtgctgactcggagcgacaagaaccggggcaagagcgacaacgtgccctccgaagaggtcgtgaagaagatgaagaactactggcgccagctgctgaatgccaagctgattacccagaggaagttcgacaatctgaccaaggccgagagaggcggcctgagcgaactggataaggccggcttcatcaagagacagctggtggaaacccggcagatcacaaagcacgtggcacagatcctggactcccggatgaacactaagtacgacgagaacgacaaactgatccgggaagtgaaagtgatcaccctgaagtccaagctggtgtccgatttccggaaggatttccagttttacaaagtgcgcgagatcaacaactaccaccacgcccacgacgcctacctgaacgccgtcgtgggaaccgccctgatcaaaaagtaccctaagctggaaagcgagttcgtgtacggcgactacaaggtgtacgacgtgcggaagatgatcgccaagagcgagcaggaaatcggcaaggctaccgccaagtacttcttctacagcaacatcatgaactttttcaagaccgagattaccctggccaacggcgagatccggaagcggcctctgatcgagacaaacggcgaaacaggcgagatcgtgtgggataagggccgggactttgccaccgtgcggaaagtgctgtctatgccccaagtgaatatcgtgaaaaagaccgaggtgcagacaggcggcttcagcaaagagtctatcctgcccaagaggaacagcgacaagctgatcgccagaaagaaggactgggaccctaagaagtacggcggcttcgacagccccaccgtggcctattctgtgctggtggtggccaaagtggaaaagggcaagtccaagaaactgaagagtgtgaaagagctgctggggatcaccatcatggaaagaagcagcttcgagaagaatcccatcgactttctggaagccaagggctacaaagaagtgaaaaaggacctgatcatcaagctgcctaagtactccctgttcgagctggaaaacggccggaagagaatgctggcctctgccggcgaactgcagaagggaaacgaactggccctgccctccaaatatgtgaacttcctgtacctggccagccactatgagaagctgaagggctcccccgaggataatgagcagaaacagctgtttgtggaacagcacaaacactacctggacgagatcatcgagcagatcagcgagttctccaagagagtgatcctggccgacgctaatctggacaaggtgctgagcgcctacaacaagcacagagacaagcctatcagagagcaggccgagaatatcatccacctgtttaccctgaccaatctgggagcccctgccgccttcaagtactttgacaccaccatcgaccggaagaggtacaccagcaccaaagaggtgctggacgccaccctgatccaccagagcatcaccggcctgtacgagacacggatcgacctgtctcagctgggaggcgacgcctatccctatgacgtgcccgattatgccagcctgggcagcggctcccccaagaaaaaacgcaaggtggaagatcctaagaaaaagcggaaagtggacggcggagggccgagctctggcgcacccccaccaagtggagggtctcctgccgggtccccaacatctactgaagaaggcaccagcgaatccgcaacgcccgagtcaggccctggtacctccacagaaccatctgaaggtagtgcgcctggttccccagctggaagccctacttccaccgaagaaggcacgtcaaccgaaccaagtgaaggatctgcccctgggaccagcactgaaccatctgagatgggccctatggagatatacaagacagtgtctgcatggaagagacagccagtgcgggtactgagcctcttcagaaacatcgacaaggtactaaagagtttgggcttcttggaaagcggttctggttctgggggaggaacgctgaagtacgtggaagatgtcacaaatgtcgtgaggagagacgtggagaaatggggcccctttgacctggtgtacggctcgacgcagcccctaggcagctcttgtgatcgctgtcccggctggtacatgttccagttccaccggatcctgcagtatgcgctgcctcgccaggagagtcagcggcccttcttctggatattcatggacaatctgctgctgactgaggatgaccaagagacaactacccgcttccttcagacagaggctgtgaccctccaggatgtccgtggcagagactaccagaatgctatgcgggtgtggagcaacattccagggctgaagagcaagcatgcgcccctgaccccaaaggaagaagagtatctgcaagcccaagtcagaagcaggagcaagctggacgccccgaaagttgacctcctggtgaagaactgccttctcccgctgagagagtacttcaagtatttttctcaaaactcacttcctctttctagcggcaatagtaacgctaacagccgcgggccgagcttcagcagcggcctggtgccgttaagcttgcgcggcagccatatgaaccatgaccaggaatttgaccccccaaaggtttacccacctgtgccagctgagaagaggaagcccatccgcgtgctgtctctctttgatgggattgctacagggctcctggtgctgaaggacctgggcatccaagtggaccgctacattgcctccgaggtgtgtgaggactccatcacggtgggcatggtgcggcaccagggaaagatcatgtacgtcggggacgtccgcagcgtcacacagaagcatatccaggagtggggcccattcgacctggtgattggaggcagtccctgcaatgacctctccattgtcaaccctgcccgcaagggactttatgagggtactggccgcctcttctttgagttctaccgcctcctgcatgatgcgcggcccaaggagggagatgatcgccccttcttctggctctttgagaatgtggtggccatgggcgttagtgacaagagggacatctcgcgatttcttgagtctaaccccgtgatgattgacgccaaagaagtgtctgctgcacacagggcccgttacttctggggtaaccttcctggcatgaacaggcctttggcatccactgtgaatgataagctggagctgcaagagtgtctggagcacggcagaatagccaagttcagcaaagtgaggaccattaccaccaggtcaaactctataaagcagggcaaagaccagcatttccccgtcttcatgaacgagaaggaggacatcctgtggtgcactgaaatggaaagggtgtttggcttccccgtccactacacagacgtctccaacatgagccgcttggcgaggcagagactgctgggccgatcgtggagcgtgccggtcatccgccacctcttcgctccgctgaaggaatattttgcttgtgtggacggcagcggcagcgagacccccggtaccagcgagagcgccacccccgagagcatgaacaattcccagggaagagtgaccttcgaggatgtcactgtgaacttcacccagggggagtggcagcggctgaatcccgaacagagaaacttgtacagggatgtgatgctggagaattacagcaaccttgtctctgtgggacaaggggaaaccaccaaacccgatgtgatcttgaggttggaacaaggaaaggagccatggttggaggaagaggaagtgctgggaagtggccgtgcagaaaaaaatggggacattggagggcagatttggaagccaaaggatgtgaaagagagtctcctcgagtgataatagg

SEQ ID NO: 209 - DNA, 6357 bp, synthetic construct
  misc_feature 1..6357: note = V24 CDS
  source 1..6357: mol_type = other DNA
atggtccctgctgctaagagagtgaaactggatggatccgacaagaagtacagcatcggcctggccatcggcaccaactctgtgggctgggccgtgatcaccgacgagtacaaggtgcccagcaagaaattcaaggtgctgggcaacaccgaccggcacagcatcaagaagaacctgatcggcgccctgctgttcgacagcggagaaacagccgaggccacccggctgaagagaaccgccagaagaagatacaccagacggaagaaccggatctgctatctgcaagagatcttcagcaacgagatggccaaggtggacgacagcttcttccacagactggaagagtccttcctggtggaagaggataagaagcacgagcggcaccccatcttcggcaacatcgtggacgaggtggcctaccacgagaagtaccccaccatctaccacctgagaaagaaactggtggacagcaccgacaaggccgacctgcggctgatctatctggccctggcccacatgatcaagttccggggccacttcctgatcgagggcgacctgaaccccgacaacagcgacgtggacaagctgttcatccagctggtgcagacctacaaccagctgttcgaggaaaaccccatcaacgccagcggcgtggacgccaaggccatcctgtctgccagactgagcaagagcagacggctggaaaatctgatcgcccagctgcccggcgagaagaagaatggcctgttcggcaacctgattgccctgagcctgggcctgacccccaacttcaagagcaacttcgacctggccgaggatgccaaactgcagctgagcaaggacacctacgacgacgacctggacaacctgctggcccagatcggcgaccagtacgccgacctgtttctggccgccaagaacctgtccgacgccatcctgctgagcgacatcctgagagtgaacaccgagatcaccaaggcccccctgagcgcctctatgatcaagagatacgacgagcaccaccaggacctgaccctgctgaaagctctcgtgcggcagcagctgcctgagaagtacaaagagattttcttcgaccagagcaagaacggctacgccggctacatcgatggcggagccagccaggaagagttctacaagttcatcaagcccatcctggaaaagatggacggcaccgaggaactgctcgtgaagctgaacagagaggacctgctgcggaagcagcggaccttcgacaacggcagcatcccccaccagatccacctgggagagctgcacgccattctgcggcggcaggaagatttttacccattcctgaaggacaaccgggaaaagatcgagaagatcctgaccttccgcatcccctactacgtgggccctctggccaggggaaacagcagattcgcctggatgaccagaaagagcgaggaaaccatcaccccctggaacttcgaggaagtggtggacaagggcgccagcgcccagagcttcatcgagcggatgaccaacttcgataagaacctgcccaacgagaaggtgctgcccaagcacagcctgctgtacgagtacttcaccgtgtacaacgagctgaccaaagtgaaatacgtgaccgagggaatgagaaagcccgccttcctgagcggcgagcagaaaaaagccatcgtggacctgctgttcaagaccaaccggaaagtgaccgtgaagcagctgaaagaggactacttcaagaaaatcgagtgcttcgactccgtggaaatctccggcgtggaagatcggttcaacgcctccctgggcacataccacgatctgctgaaaattatcaaggacaaggacttcctggacaatgaggaaaacgaggacattctggaagatatcgtgctgaccctgacactgtttgaggacagagagatgatcgaggaacggctgaaaacctatgcccacctgttcgacgacaaagtgatgaagcagctgaagcggcggagatacaccggctggggcaggctgagccggaagctgatcaacggcatccgggacaagcagtccggcaagacaatcctggatttcctgaagtccgacggcttcgccaacagaaacttcatgcagctgatccacgacgacagcctgacctttaaagaggacatccagaaagcccaggtgtccggccagggcgatagcctgcacgagcacattgccaatctggccggcagccccgccattaagaagggcatcctgcagacagtgaaggtggtggacgagctcgtgaaagtgatgggccggcacaagcccgagaacatcgtgatcgaaatggccagagagaaccagaccacccagaagggacagaagaacagccgcgagagaatgaagcggatcgaagagggcatcaaagagctgggcagccagatcctgaaagaacaccccgtggaaaacacccagctgcagaacgagaagctgtacctgtactacctgcagaatgggcgggatatgtacgtggaccaggaactggacatcaaccggctgtccgactacgatgtggacgctatcgtgcctcagagctttctgaaggacgactccatcgataacaaagtgctgactcggagcgacaagaaccggggcaagagcgacaacgtgccctccgaagaggtcgtgaagaagatgaagaactactggcgccagctgctgaatgccaagctgattacccagaggaagttcgacaatctgaccaaggccgagagaggcggcctgagcgaactggataaggccggcttcatcaagagacagctggtggaaacccggcagatcacaaagcacgtggcacagatcctggactcccggatgaacactaagtacgacgagaacgacaaactgatccgggaagtgaaagtgatcaccctgaagtccaagctggtgtccgatttccggaaggatttccagttttacaaagtgcgcgagatcaacaactaccaccacgcccacgacgcctacctgaacgccgtcgtgggaaccgccctgatcaaaaagtaccctaagctggaaagcgagttcgtgtacggcgactacaaggtgtacgacgtgcggaagatgatcgccaagagcgagcaggaaatcggcaaggctaccgccaagtacttcttctacagcaacatcatgaactttttcaagaccgagattaccctggccaacggcgagatccggaagcggcctctgatcgagacaaacggcgaaacaggcgagatcgtgtgggataagggccgggactttgccaccgtgcggaaagtgctgtctatgccccaagtgaatatcgtgaaaaagaccgaggtgcagacaggcggcttcagcaaagagtctatcctgcccaagaggaacagcgacaagctgatcgccagaaagaaggactgggaccctaagaagtacggcggcttcgacagccccaccgtggcctattctgtgctggtggtggccaaagtggaaaagggcaagtccaagaaactgaagagtgtgaaagagctgctggggatcaccatcatggaaagaagcagcttcgagaagaatcccatcgactttctggaagccaagggctacaaagaagtgaaaaaggacctgatcatcaagctgcctaagtactccctgttcgagctggaaaacggccggaagagaatgctggcctctgccggcgaactgcagaagggaaacgaactggccctgccctccaaatatgtgaacttcctgtacctggccagccactatgagaagctgaagggctcccccgaggataatgagcagaaacagctgtttgtggaacagcacaaacactacctggacgagatcatcgagcagatcagcgagttctccaagagagtgatcctggccgacgctaatctggacaaggtgctgagcgcctacaacaagcacagagacaagcctatcagagagcaggccgagaatatcatccacctgtttaccctgaccaatctgggagcccctgccgccttcaagtactttgacaccaccatcgaccggaagaggtacaccagcaccaaagaggtgctggacgccaccctgatccaccagagcatcaccggcctgtacgagacacggatcgacctgtctcagctgggaggcgacgcctatccctatgacgtgcccgattatgccagcctgggcagcggctcccccaagaaaaaacgcaaggtggaagatcctaagaaaaagcggaaagtggacggcggagggccgagctctggcgcacccccaccaagtggagggtctcctgccgggtccccaacatctactgaagaaggcaccagcgaatccgcaacgcccgagtcaggccctggtacctccacagaaccatctgaaggtagtgcgcctggttccccagctggaagccctacttccaccgaagaaggcacgtcaaccgaaccaagtgaaggatctgcccctgggaccagcactgaaccatctgagatgaaccatgaccaggaatttgaccccccaaaggtttacccacctgtgccagctgagaagaggaagcccatccgcgtgctgtctctctttgatgggattgctacagggctcctggtgctgaaggacctgggcatccaagtggaccgctacattgcctccgaggtgtgtgaggactccatcacggtgggcatggtgcggcaccagggaaagatcatgtacgtcggggacgtccgcagcgtcacacagaagcatatccaggagtggggcccattcgacctggtgattggaggcagtccctgcaatgacctctccattgtcaaccctgcccgcaagggactttatgagggtactggccgcctcttctttgagttctaccgcctcctgcatgatgcgcggcccaaggagggagatgatcgccccttcttctggctctttgagaatgtggtggccatgggcgttagtgacaagagggacatctcgcgatttcttgagtctaaccccgtgatgattgacgccaaagaagtgtctgctgcacacagggcccgttacttctggggtaaccttcctggcatgaacaggcctttggcatccactgtgaatgataagctggagctgcaagagtgtctggagcacggcagaatagccaagttcagcaaagtgaggaccattaccaccaggtcaaactctataaagcagggcaaagaccagcatttccccgtcttcatgaacgagaaggaggacatcctgtggtgcactgaaatggaaagggtgtttggcttccccgtccactacacagacgtctccaacatgagccgcttggcgaggcagagactgctgggccgatcgtggagcgtgccggtcatccgccacctcttcgctccgctgaaggaatattttgcttgtgtgtctagcggcaatagtaacgctaacagccgcgggccgagcttcagcagcggcctggtgccgttaagcttgcgcggcagccatatgggccctatggagatatacaagacagtgtctgcatggaagagacagccagtgcgggtactgagcctcttcagaaacatcgacaaggtactaaagagtttgggcttcttggaaagcggttctggttctgggggaggaacgctgaagtacgtggaagatgtcacaaatgtcgtgaggagagacgtggagaaatggggcccctttgacctggtgtacggctcgacgcagcccctaggcagctcttgtgatcgctgtcccggctggtacatgttccagttccaccggatcctgcagtatgcgctgcctcgccaggagagtcagcggcccttcttctggatattcatggacaatctgctgctgactgaggatgaccaagagacaactacccgcttccttcagacagaggctgtgaccctccaggatgtccgtggcagagactaccagaatgctatgcgggtgtggagcaacattccagggctgaagagcaagcatgcgcccctgaccccaaaggaagaagagtatctgcaagcccaagtcagaagcaggagcaagctggacgccccgaaagttgacctcctggtgaagaactgccttctcccgctgagagagtacttcaagtatttttctcaaaactcacttcctcttgacggcagcggcagcgagacccccggtaccagcgagagcgccacccccgagagccggacactggtgaccttcaaggatgtatttgtggacttcaccagggaggagtggaagctgctggacactgctcagcagatcgtgtacagaaatgtgatgctggagaactataagaacctggtttccttgggttatcagcttactaagccagatgtgatcctccggttggagaagggagaagagccctga

SEQ ID NO: 210 - DNA, 6357 bp, synthetic construct
  misc_feature 1..6357: note = V25 CDS
  source 1..6357: mol_type = other DNA
atggtccctgctgctaagagagtgaaactggatggatccgacaagaagtacagcatcggcctggccatcggcaccaactctgtgggctgggccgtgatcaccgacgagtacaaggtgcccagcaagaaattcaaggtgctgggcaacaccgaccggcacagcatcaagaagaacctgatcggcgccctgctgttcgacagcggagaaacagccgaggccacccggctgaagagaaccgccagaagaagatacaccagacggaagaaccggatctgctatctgcaagagatcttcagcaacgagatggccaaggtggacgacagcttcttccacagactggaagagtccttcctggtggaagaggataagaagcacgagcggcaccccatcttcggcaacatcgtggacgaggtggcctaccacgagaagtaccccaccatctaccacctgagaaagaaactggtggacagcaccgacaaggccgacctgcggctgatctatctggccctggcccacatgatcaagttccggggccacttcctgatcgagggcgacctgaaccccgacaacagcgacgtggacaagctgttcatccagctggtgcagacctacaaccagctgttcgaggaaaaccccatcaacgccagcggcgtggacgccaaggccatcctgtctgccagactgagcaagagcagacggctggaaaatctgatcgcccagctgcccggcgagaagaagaatggcctgttcggcaacctgattgccctgagcctgggcctgacccccaacttcaagagcaacttcgacctggccgaggatgccaaactgcagctgagcaaggacacctacgacgacgacctggacaacctgctggcccagatcggcgaccagtacgccgacctgtttctggccgccaagaacctgtccgacgccatcctgctgagcgacatcctgagagtgaacaccgagatcaccaaggcccccctgagcgcctctatgatcaagagatacgacgagcaccaccaggacctgaccctgctgaaagctctcgtgcggcagcagctgcctgagaagtacaaagagattttcttcgaccagagcaagaacggctacgccggctacatcgatggcggagccagccaggaagagttctacaagttcatcaagcccatcctggaaaagatggacggcaccgaggaactgctcgtgaagctgaacagagaggacctgctgcggaagcagcggaccttcgacaacggcagcatcccccaccagatccacctgggagagctgcacgccattctgcggcggcaggaagatttttacccattcctgaaggacaaccgggaaaagatcgagaagatcctgaccttccgcatcccctactacgtgggccctctggccaggggaaacagcagattcgcctggatgaccagaaagagcgaggaaaccatcaccccctggaacttcgaggaagtggtggacaagggcgccagcgcccagagcttcatcgagcggatgaccaacttcgataagaacctgcccaacgagaaggtgctgcccaagcacagcctgctgtacgagtacttcaccgtgtacaacgagctgaccaaagtgaaatacgtgaccgagggaatgagaaagcccgccttcctgagcggcgagcagaaaaaagccatcgtggacctgctgttcaagaccaaccggaaagtgaccgtgaagcagctgaaagaggactacttcaagaaaatcgagtgcttcgactccgtggaaatctccggcgtggaagatcggttcaacgcctccctgggcacataccacgatctgctgaaaattatcaaggacaaggacttcctggacaatgaggaaaacgaggacattctggaagatatcgtgctgaccctgacactgtttgaggacagagagatgatcgaggaacggctgaaaacctatgcccacctgttcgacgacaaagtgatgaagcagctgaagcggcggagatacaccggctggggcaggctgagccggaagctgatcaacggcatccgggacaagcagtccggcaagacaatcctggatttcctgaagtccgacggcttcgccaacagaaacttcatgcagctgatccacgacgacagcctgacctttaaagaggacatccagaaagcccaggtgtccggccagggcgatagcctgcacgagcacattgccaatctggccggcagccccgccattaagaagggcatcctgcagacagtgaaggtggtggacgagctcgtgaaagtgatgggccggcacaagcccgagaacatcgtgatcgaaatggccagagagaaccagaccacccagaagggacagaagaacagccgcgagagaatgaagcggatcgaagagggcatcaaagagctgggcagccagatcctgaaagaacaccccgtggaaaacacccagctgcagaacgagaagctgtacctgtactacctgcagaatgggcgggatatgtacgtggaccaggaactggacatcaaccggctgtccgactacgatgtggacgctatcgtgcctcagagctttctgaaggacgactccatcgataacaaagtgctgactcggagcgacaagaaccggggcaagagcgacaacgtgccctccgaagaggtcgtgaagaagatgaagaactactggcgccagctgctgaatgccaagctgattacccagaggaagttcgacaatctgaccaaggccgagagaggcggcctgagcgaactggataaggccggcttcatcaagagacagctggtggaaacccggcagatcacaaagcacgtggcacagatcctggactcccggatgaacactaagtacgacgagaacgacaaactgatccgggaagtgaaagtgatcaccctgaagtccaagctggtgtccgatttccggaaggatttccagttttacaaagtgcgcgagatcaacaactaccaccacgcccacgacgcctacctgaacgccgtcgtgggaaccgccctgatcaaaaagtaccctaagctggaaagcgagttcgtgtacggcgactacaaggtgtacgacgtgcggaagatgatcgccaagagcgagcaggaaatcggcaaggctaccgccaagtacttcttctacagcaacatcatgaactttttcaagaccgagattaccctggccaacggcgagatccggaagcggcctctgatcgagacaaacggcgaaacaggcgagatcgtgtgggataagggccgggactttgccaccgtgcggaaagtgctgtctatgccccaagtgaatatcgtgaaaaagaccgaggtgcagacaggcggcttcagcaaagagtctatcctgcccaagaggaacagcgacaagctgatcgccagaaagaaggactgggaccctaagaagtacggcggcttcgacagccccaccgtggcctattctgtgctggtggtggccaaagtggaaaagggcaagtccaagaaactgaagagtgtgaaagagctgctggggatcaccatcatggaaagaagcagcttcgagaagaatcccatcgactttctggaagccaagggctacaaagaagtgaaaaaggacctgatcatcaagctgcctaagtactccctgttcgagctggaaaacggccggaagagaatgctggcctctgccggcgaactgcagaagggaaacgaactggccctgccctccaaatatgtgaacttcctgtacctggccagccactatgagaagctgaagggctcccccgaggataatgagcagaaacagctgtttgtggaacagcacaaacactacctggacgagatcatcgagcagatcagcgagttctccaagagagtgatcctggccgacgctaatctggacaaggtgctgagcgcctacaacaagcacagagacaagcctatcagagagcaggccgagaatatcatccacctgtttaccctgaccaatctgggagcccctgccgccttcaagtactttgacaccaccatcgaccggaagaggtacaccagcaccaaagaggtgctggacgccaccctgatccaccagagcatcaccggcctgtacgagacacggatcgacctgtctcagctgggaggcgacgcctatccctatgacgtgcccgattatgccagcctgggcagcggctcccccaagaaaaaacgcaaggtggaagatcctaagaaaaagcggaaagtggacggcggagggccgagctctggcgcacccccaccaagtggagggtctcctgccgggtccccaacatctactgaagaaggcaccagcgaatccgcaacgcccgagtcaggccctggtacctccacagaaccatctgaaggtagtgcgcctggttccccagctggaagccctacttccaccgaagaaggcacgtcaaccgaaccaagtgaaggatctgcccctgggaccagcactgaaccatctgagatgggccctatggagatatacaagacagtgtctgcatggaagagacagccagtgcgggtactgagcctcttcagaaacatcgacaaggtactaaagagtttgggcttcttggaaagcggttctggttctgggggaggaacgctgaagtacgtggaagatgtcacaaatgtcgtgaggagagacgtggagaaatggggcccctttgacctggtgtacggctcgacgcagcccctaggcagctcttgtgatcgctgtcccggctggtacatgttccagttccaccggatcctgcagtatgcgctgcctcgccaggagagtcagcggcccttcttctggatattcatggacaatctgctgctgactgaggatgaccaagagacaactacccgcttccttcagacagaggctgtgaccctccaggatgtccgtggcagagactaccagaatgctatgcgggtgtggagcaacattccagggctgaagagcaagcatgcgcccctgaccccaaaggaagaagagtatctgcaagcccaagtcagaagcaggagcaagctggacgccccgaaagttgacctcctggtgaagaactgccttctcccgctgagagagtacttcaagtatttttctcaaaactcacttcctctttctagcggcaatagtaacgctaacagccgcgggccgagcttcagcagcggcctggtgccgttaagcttgcgcggcagccatatgaaccatgaccaggaatttgaccccccaaaggtttacccacctgtgccagctgagaagaggaagcccatccgcgtgctgtctctctttgatgggattgctacagggctcctggtgctgaaggacctgggcatccaagtggaccgctacattgcctccgaggtgtgtgaggactccatcacggtgggcatggtgcggcaccagggaaagatcatgtacgtcggggacgtccgcagcgtcacacagaagcatatccaggagtggggcccattcgacctggtgattggaggcagtccctgcaatgacctctccattgtcaaccctgcccgcaagggactttatgagggtactggccgcctcttctttgagttctaccgcctcctgcatgatgcgcggcccaaggagggagatgatcgccccttcttctggctctttgagaatgtggtggccatgggcgttagtgacaagagggacatctcgcgatttcttgagtctaaccccgtgatgattgacgccaaagaagtgtctgctgcacacagggcccgttacttctggggtaaccttcctggcatgaacaggcctttggcatccactgtgaatgataagctggagctgcaagagtgtctggagcacggcagaatagccaagttcagcaaagtgaggaccattaccaccaggtcaaactctataaagcagggcaaagaccagcatttccccgtcttcatgaacgagaaggaggacatcctgtggtgcactgaaatggaaagggtgtttggcttccccgtccactacacagacgtctccaacatgagccgcttggcgaggcagagactgctgggccgatcgtggagcgtgccggtcatccgccacctcttcgctccgctgaaggaatattttgcttgtgtggacggcagcggcagcgagacccccggtaccagcgagagcgccacccccgagagccggacactggtgaccttcaaggatgtatttgtggacttcaccagggaggagtggaagctgctggacactgctcagcagatcgtgtacagaaatgtgatgctggagaactataagaacctggtttccttgggttatcagcttactaagccagatgtgatcctccggttggagaagggagaagagccctga

SEQ ID NO: 211 - DNA, 6586 bp, synthetic construct
  misc_feature 1..6586: note = V26 CDS
  source 1..6586: mol_type = other DNA
atggtccctgctgctaagagagtgaaactggatggatccgacaagaagtacagcatcggcctggccatcggcaccaactctgtgggctgggccgtgatcaccgacgagtacaaggtgcccagcaagaaattcaaggtgctgggcaacaccgaccggcacagcatcaagaagaacctgatcggcgccctgctgttcgacagcggagaaacagccgaggccacccggctgaagagaaccgccagaagaagatacaccagacggaagaaccggatctgctatctgcaagagatcttcagcaacgagatggccaaggtggacgacagcttcttccacagactggaagagtccttcctggtggaagaggataagaagcacgagcggcaccccatcttcggcaacatcgtggacgaggtggcctaccacgagaagtaccccaccatctaccacctgagaaagaaactggtggacagcaccgacaaggccgacctgcggctgatctatctggccctggcccacatgatcaagttccggggccacttcctgatcgagggcgacctgaaccccgacaacagcgacgtggacaagctgttcatccagctggtgcagacctacaaccagctgttcgaggaaaaccccatcaacgccagcggcgtggacgccaaggccatcctgtctgccagactgagcaagagcagacggctggaaaatctgatcgcccagctgcccggcgagaagaagaatggcctgttcggcaacctgattgccctgagcctgggcctgacccccaacttcaagagcaacttcgacctggccgaggatgccaaactgcagctgagcaaggacacctacgacgacgacctggacaacctgctggcccagatcggcgaccagtacgccgacctgtttctggccgccaagaacctgtccgacgccatcctgctgagcgacatcctgagagtgaacaccgagatcaccaaggcccccctgagcgcctctatgatcaagagatacgacgagcaccaccaggacctgaccctgctgaaagctctcgtgcggcagcagctgcctgagaagtacaaagagattttcttcgaccagagcaagaacggctacgccggctacatcgatggcggagccagccaggaagagttctacaagttcatcaagcccatcctggaaaagatggacggcaccgaggaactgctcgtgaagctgaacagagaggacctgctgcggaagcagcggaccttcgacaacggcagcatcccccaccagatccacctgggagagctgcacgccattctgcggcggcaggaagatttttacccattcctgaaggacaaccgggaaaagatcgagaagatcctgaccttccgcatcccctactacgtgggccctctggccaggggaaacagcagattcgcctggatgaccagaaagagcgaggaaaccatcaccccctggaacttcgaggaagtggtggacaagggcgccagcgcccagagcttcatcgagcggatgaccaacttcgataagaacctgcccaacgagaaggtgctgcccaagcacagcctgctgtacgagtacttcaccgtgtacaacgagctgaccaaagtgaaatacgtgaccgagggaatgagaaagcccgccttcctgagcggcgagcagaaaaaagccatcgtggacctgctgttcaagaccaaccggaaagtgaccgtgaagcagctgaaagaggactacttcaagaaaatcgagtgcttcgactccgtggaaatctccggcgtggaagatcggttcaacgcctccctgggcacataccacgatctgctgaaaattatcaaggacaaggacttcctggacaatgaggaaaacgaggacattctggaagatatcgtgctgaccctgacactgtttgaggacagagagatgatcgaggaacggctgaaaacctatgcccacctgttcgacgacaaagtgatgaagcagctgaagcggcggagatacaccggctggggcaggctgagccggaagctgatcaacggcatccgggacaagcagtccggcaagacaatcctggatttcctgaagtccgacggcttcgccaacagaaacttcatgcagctgatccacgacgacagcctgacctttaaagaggacatccagaaagcccaggtgtccggccagggcgatagcctgcacgagcacattgccaatctggccggcagccccgccattaagaagggcatcctgcagacagtgaaggtggtggacgagctcgtgaaagtgatgggccggcacaagcccgagaacatcgtgatcgaaatggccagagagaaccagaccacccagaagggacagaagaacagccgcgagagaatgaagcggatcgaagagggcatcaaagagctgggcagccagatcctgaaagaacaccccgtggaaaacacccagctgcagaacgagaagctgtacctgtactacctgcagaatgggcgggatatgtacgtggaccaggaactggacatcaaccggctgtccgactacgatgtggacgctatcgtgcctcagagctttctgaaggacgactccatcgataacaaagtgctgactcggagcgacaagaaccggggcaagagcgacaacgtgccctccgaagaggtcgtgaagaagatgaagaactactggcgccagctgctgaatgccaagctgattacccagaggaagttcgacaatctgaccaaggccgagagaggcggcctgagcgaactggataaggccggcttcatcaagagacagctggtggaaacccggcagatcacaaagcacgtggcacagatcctggactcccggatgaacactaagtacgacgagaacgacaaactgatccgggaagtgaaagtgatcaccctgaagtccaagctggtgtccgatttccggaaggatttccagttttacaaagtgcgcgagatcaacaactaccaccacgcccacgacgcctacctgaacgccgtcgtgggaaccgccctgatcaaaaagtaccctaagctggaaagcgagttcgtgtacggcgactacaaggtgtacgacgtgcggaagatgatcgccaagagcgagcaggaaatcggcaaggctaccgccaagtacttcttctacagcaacatcatgaactttttcaagaccgagattaccctggccaacggcgagatccggaagcggcctctgatcgagacaaacggcgaaacaggcgagatcgtgtgggataagggccgggactttgccaccgtgcggaaagtgctgtctatgccccaagtgaatatcgtgaaaaagaccgaggtgcagacaggcggcttcagcaaagagtctatcctgcccaagaggaacagcgacaagctgatcgccagaaagaaggactgggaccctaagaagtacggcggcttcgacagccccaccgtggcctattctgtgctggtggtggccaaagtggaaaagggcaagtccaagaaactgaagagtgtgaaagagctgctggggatcaccatcatggaaagaagcagcttcgagaagaatcccatcgactttctggaagccaagggctacaaagaagtgaaaaaggacctgatcatcaagctgcctaagtactccctgttcgagctggaaaacggccggaagagaatgctggcctctgccggcgaactgcagaagggaaacgaactggccctgccctccaaatatgtgaacttcctgtacctggccagccactatgagaagctgaagggctcccccgaggataatgagcagaaacagctgtttgtggaacagcacaaacactacctggacgagatcatcgagcagatcagcgagttctccaagagagtgatcctggccgacgctaatctggacaaggtgctgagcgcctacaacaagcacagagacaagcctatcagagagcaggccgagaatatcatccacctgtttaccctgaccaatctgggagcccctgccgccttcaagtactttgacaccaccatcgaccggaagaggtacaccagcaccaaagaggtgctggacgccaccctgatccaccagagcatcaccggcctgtacgagacacggatcgacctgtctcagctgggaggcgacgcctatccctatgacgtgcccgattatgccagcctgggcagcggctcccccaagaaaaaacgcaaggtggaagatcctaagaaaaagcggaaagtggacggcggagggccgagctctggcgcacccccaccaagtggagggtctcctgccgggtccccaacatctactgaagaaggcaccagcgaatccgcaacgcccgagtcaggccctggtacctccacagaaccatctgaaggtagtgcgcctggttccccagctggaagccctacttccaccgaagaaggcacgtcaaccgaaccaagtgaaggatctgcccctgggaccagcactgaaccatctgagcggacactggtgaccttcaaggatgtatttgtggacttcaccagggaggagtggaagctgctggacactgctcagcagatcgtgtacagaaatgtgatgctggagaactataagaacctggtttccttgggttatcagcttactaagccagatgtgatcctccggttggagaagggagaagagcccagcggcagcgagacccccggtaccagcgagagcgctacacccgaatccggccccggcagccccgccggcagccctacaagcaccgaggagggcacctccgaatccgccacccctgagagcggacccggcagcgagcctgccacaagcggcagcgagacacctggaacaagcgagagcgccacacctgaaagcggccccggaacatccaccgagcctagcgagggcagcgcccctggcacaagcacagagccttccgagagcgccacccccgagagcatgggccctatggagatatacaagacagtgtctgcatggaagagacagccagtgcgggtactgagcctcttcagaaacatcgacaaggtactaaagagtttgggcttcttggaaagcggttctggttctgggggaggaacgctgaagtacgtggaagatgtcacaaatgtcgtgaggagagacgtggagaaatggggcccctttgacctggtgtacggctcgacgcagcccctaggcagctcttgtgatcgctgtcccggctggtacatgttccagttccaccggatcctgcagtatgcgctgcctcgccaggagagtcagcggcccttcttctggatattcatggacaatctgctgctgactgaggatgaccaagagacaactacccgcttccttcagacagaggctgtgaccctccaggatgtccgtggcagagactaccagaatgctatgcgggtgtggagcaacattccagggctgaagagcaagcatgcgcccctgaccccaaaggaagaagagtatctgcaagcccaagtcagaagcaggagcaagctggacgccccgaaagttgacctcctggtgaagaactgccttctcccgctgagagagtacttcaagtatttttctcaaaactcacttcctctttctagcggcaatagtaacgctaacagccgcgggccgagcttcagcagcggcctggtgccgttaagcttgcgcggcagccatatgaaccatgaccaggaatttgaccccccaaaggtttacccacctgtgccagctgagaagaggaagcccatccgcgtgctgtctctctttgatgggattgctacagggctcctggtgctgaaggacctgggcatccaagtggaccgctacattgcctccgaggtgtgtgaggactccatcacggtgggcatggtgcggcaccagggaaagatcatgtacgtcggggacgtccgcagcgtcacacagaagcatatccaggagtggggcccattcgacctggtgattggaggcagtccctgcaatgacctctccattgtcaaccctgcccgcaagggactttatgagggtactggccgcctcttctttgagttctaccgcctcctgcatgatgcgcggcccaaggagggagatgatcgccccttcttctggctctttgagaatgtggtggccatgggcgttagtgacaagagggacatctcgcgatttcttgagtctaaccccgtgatgattgacgccaaagaagtgtctgctgcacacagggcccgttacttctggggtaaccttcctggcatgaacaggcctttggcatccactgtgaatgataagctggagctgcaagagtgtctggagcacggcagaatagccaagttcagcaaagtgaggaccattaccaccaggtcaaactctataaagcagggcaaagaccagcatttccccgtcttcatgaacgagaaggaggacatcctgtggtgcactgaaatggaaagggtgtttggcttccccgtccactacacagacgtctccaacatgagccgcttggcgaggcagagactgctgggccgatcgtggagcgtgccggtcatccgccacctcttcgctccgctgaaggaatattttgcttgtgtgtgataatagg

SEQ ID NO: 212 - DNA, 6586 bp, synthetic construct
  misc_feature 1..6586: note = V27 CDS
  source 1..6586: mol_type = other DNA
atggtccctgctgctaagagagtgaaactggatggatccgacaagaagtacagcatcggcctggccatcggcaccaactctgtgggctgggccgtgatcaccgacgagtacaaggtgcccagcaagaaattcaaggtgctgggcaacaccgaccggcacagcatcaagaagaacctgatcggcgccctgctgttcgacagcggagaaacagccgaggccacccggctgaagagaaccgccagaagaagatacaccagacggaagaaccggatctgctatctgcaagagatcttcagcaacgagatggccaaggtggacgacagcttcttccacagactggaagagtccttcctggtggaagaggataagaagcacgagcggcaccccatcttcggcaacatcgtggacgaggtggcctaccacgagaagtaccccaccatctaccacctgagaaagaaactggtggacagcaccgacaaggccgacctgcggctgatctatctggccctggcccacatgatcaagttccggggccacttcctgatcgagggcgacctgaaccccgacaacagcgacgtggacaagctgttcatccagctggtgcagacctacaaccagctgttcgaggaaaaccccatcaacgccagcggcgtggacgccaaggccatcctgtctgccagactgagcaagagcagacggctggaaaatctgatcgcccagctgcccggcgagaagaagaatggcctgttcggcaacctgattgccctgagcctgggcctgacccccaacttcaagagcaacttcgacctggccgaggatgccaaactgcagctgagcaaggacacctacgacgacgacctggacaacctgctggcccagatcggcgaccagtacgccgacctgtttctggccgccaagaacctgtccgacgccatcctgctgagcgacatcctgagagtgaacaccgagatcaccaaggcccccctgagcgcctctatgatcaagagatacgacgagcaccaccaggacctgaccctgctgaaagctctcgtgcggcagcagctgcctgagaagtacaaagagattttcttcgaccagagcaagaacggctacgccggctacatcgatggcggagccagccaggaagagttctacaagttcatcaagcccatcctggaaaagatggacggcaccgaggaactgctcgtgaagctgaacagagaggacctgctgcggaagcagcggaccttcgacaacggcagcatcccccaccagatccacctgggagagctgcacgccattctgcggcggcaggaagatttttacccattcctgaaggacaaccgggaaaagatcgagaagatcctgaccttccgcatcccctactacgtgggccctctggccaggggaaacagcagattcgcctggatgaccagaaagagcgaggaaaccatcaccccctggaacttcgaggaagtggtggacaagggcgccagcgcccagagcttcatcgagcggatgaccaacttcgataagaacctgcccaacgagaaggtgctgcccaagcacagcctgctgtacgagtacttcaccgtgtacaacgagctgaccaaagtgaaatacgtgaccgagggaatgagaaagcccgccttcctgagcggcgagcagaaaaaagccatcgtggacctgctgttcaagaccaaccggaaagtgaccgtgaagcagctgaaagaggactacttcaagaaaatcgagtgcttcgactccgtggaaatctccggcgtggaagatcggttcaacgcctccctgggcacataccacgatctgctgaaaattatcaaggacaaggacttcctggacaatgaggaaaacgaggacattctggaagatatcgtgctgaccctgacactgtttgaggacagagagatgatcgaggaacggctgaaaacctatgcccacctgttcgacgacaaagtgatgaagcagctgaagcggcggagatacaccggctggggcaggctgagccggaagctgatcaacggcatccgggacaagcagtccggcaagacaatcctggatttcctgaagtccgacggcttcgccaacagaaacttcatgcagctgatccacgacgacagcctgacctttaaagaggacatccagaaagcccaggtgtccggccagggcgatagcctgcacgagcacattgccaatctggccggcagccccgccattaagaagggcatcctgcagacagtgaaggtggtggacgagctcgtgaaagtgatgggccggcacaagcccgagaacatcgtgatcgaaatggccagagagaaccagaccacccagaagggacagaagaacagccgcgagagaatgaagcggatcgaagagggcatcaaagagctgggcagccagatcctgaaagaacaccccgtggaaaacacccagctgcagaacgagaagctgtacctgtactacctgcagaatgggcgggatatgtacgtggaccaggaactggacatcaaccggctgtccgactacgatgtggacgctatcgtgcctcagagctttctgaaggacgactccatcgataacaaagtgctgactcggagcgacaagaaccggggcaagagcgacaacgtgccctccgaagaggtcgtgaagaagatgaagaactactggcgccagctgctgaatgccaagctgattacccagaggaagttcgacaatctgaccaaggccgagagaggcggcctgagcgaactggataaggccggcttcatcaagagacagctggtggaaacccggcagatcacaaagcacgtggcacagatcctggactcccggatgaacactaagtacgacgagaacgacaaactgatccgggaagtgaaagtgatcaccctgaagtccaagctggtgtccgatttccggaaggatttccagttttacaaagtgcgcgagatcaacaactaccaccacgcccacgacgcctacctgaacgccgtcgtgggaaccgccctgatcaaaaagtaccctaagctggaaagcgagttcgtgtacggcgactacaaggtgtacgacgtgcggaagatgatcgccaagagcgagcaggaaatcggcaaggctaccgccaagtacttcttctacagcaacatcatgaactttttcaagaccgagattaccctggccaacggcgagatccggaagcggcctctgatcgagacaaacggcgaaacaggcgagatcgtgtgggataagggccgggactttgccaccgtgcggaaagtgctgtctatgccccaagtgaatatcgtgaaaaagaccgaggtgcagacaggcggcttcagcaaagagtctatcctgcccaagaggaacagcgacaagctgatcgccagaaagaaggactgggaccctaagaagtacggcggcttcgacagccccaccgtggcctattctgtgctggtggtggccaaagtggaaaagggcaagtccaagaaactgaagagtgtgaaagagctgctggggatcaccatcatggaaagaagcagcttcgagaagaatcccatcgactttctggaagccaagggctacaaagaagtgaaaaaggacctgatcatcaagctgcctaagtactccctgttcgagctggaaaacggccggaagagaatgctggcctctgccggcgaactgcagaagggaaacgaactggccctgccctccaaatatgtgaacttcctgtacctggccagccactatgagaagctgaagggctcccccgaggataatgagcagaaacagctgtttgtggaacagcacaaacactacctggacgagatcatcgagcagatcagcgagttctccaagagagtgatcctggccgacgctaatctggacaaggtgctgagcgcctacaacaagcacagagacaagcctatcagagagcaggccgagaatatcatccacctgtttaccctgaccaatctgggagcccctgccgccttcaagtactttgacaccaccatcgaccggaagaggtacaccagcaccaaagaggtgctggacgccaccctgatccaccagagcatcaccggcctgtacgagacacggatcgacctgtctcagctgggaggcgacgcctatccctatgacgtgcccgattatgccagcctgggcagcggctcccccaagaaaaaacgcaaggtggaagatcctaagaaaaagcggaaagtggacggcggagggccgagctctggcgcacccccaccaagtggagggtctcctgccgggtccccaacatctactgaagaaggcaccagcgaatccgcaacgcccgagtcaggccctggtacctccacagaaccatctgaaggtagtgcgcctggttccccagctggaagccctacttccaccgaagaaggcacgtcaaccgaaccaagtgaaggatctgcccctgggaccagcactgaaccatctgagcggacactggtgaccttcaaggatgtatttgtggacttcaccagggaggagtggaagctgctggacactgctcagcagatcgtgtacagaaatgtgatgctggagaactataagaacctggtttccttgggttatcagcttactaagccagatgtgatcctccggttggagaagggagaagagcccagcggcagcgagacccccggtaccagcgagagcgctacacccgaatccggccccggcagccccgccggcagccctacaagcaccgaggagggcacctccgaatccgccacccctgagagcggacccggcagcgagcctgccacaagcggcagcgagacacctggaacaagcgagagcgccacacctgaaagcggccccggaacatccaccgagcctagcgagggcagcgcccctggcacaagcacagagccttccgagagcgccacccccgagagcatgaaccatgaccaggaatttgaccccccaaaggtttacccacctgtgccagctgagaagaggaagcccatccgcgtgctgtctctctttgatgggattgctacagggctcctggtgctgaaggacctgggcatccaagtggaccgctacattgcctccgaggtgtgtgaggactccatcacggtgggcatggtgcggcaccagggaaagatcatgtacgtcggggacgtccgcagcgtcacacagaagcatatccaggagtggggcccattcgacctggtgattggaggcagtccctgcaatgacctctccattgtcaaccctgcccgcaagggactttatgagggtactggccgcctcttctttgagttctaccgcctcctgcatgatgcgcggcccaaggagggagatgatcgccccttcttctggctctttgagaatgtggtggccatgggcgttagtgacaagagggacatctcgcgatttcttgagtctaaccccgtgatgattgacgccaaagaagtgtctgctgcacacagggcccgttacttctggggtaaccttcctggcatgaacaggcctttggcatccactgtgaatgataagctggagctgcaagagtgtctggagcacggcagaatagccaagttcagcaaagtgaggaccattaccaccaggtcaaactctataaagcagggcaaagaccagcatttccccgtcttcatgaacgagaaggaggacatcctgtggtgcactgaaatggaaagggtgtttggcttccccgtccactacacagacgtctccaacatgagccgcttggcgaggcagagactgctgggccgatcgtggagcgtgccggtcatccgccacctcttcgctccgctgaaggaatattttgcttgtgtgtctagcggcaatagtaacgctaacagccgcgggccgagcttcagcagcggcctggtgccgttaagcttgcgcggcagccatatgggccctatggagatatacaagacagtgtctgcatggaagagacagccagtgcgggtactgagcctcttcagaaacatcgacaaggtactaaagagtttgggcttcttggaaagcggttctggttctgggggaggaacgctgaagtacgtggaagatgtcacaaatgtcgtgaggagagacgtggagaaatggggcccctttgacctggtgtacggctcgacgcagcccctaggcagctcttgtgatcgctgtcccggctggtacatgttccagttccaccggatcctgcagtatgcgctgcctcgccaggagagtcagcggcccttcttctggatattcatggacaatctgctgctgactgaggatgaccaagagacaactacccgcttccttcagacagaggctgtgaccctccaggatgtccgtggcagagactaccagaatgctatgcgggtgtggagcaacattccagggctgaagagcaagcatgcgcccctgaccccaaaggaagaagagtatctgcaagcccaagtcagaagcaggagcaagctggacgccccgaaagttgacctcctggtgaagaactgccttctcccgctgagagagtacttcaagtatttttctcaaaactcacttcctctttgataatagg

SEQ ID NO: 213 - DNA, 6573 bp, synthetic construct
  misc_feature 1..6573: note = V28 CDS
  source 1..6573: mol_type = other DNA
atgccaaaaaagaagagaaaggtaatggacaagaagtacagcatcggcctggccatcggcaccaactctgtgggctgggccgtgatcaccgacgagtacaaggtgcccagcaagaaattcaaggtgctgggcaacaccgaccggcacagcatcaagaagaacctgatcggcgccctgctgttcgacagcggagaaacagccgaggccacccggctgaagagaaccgccagaagaagatacaccagacggaagaaccggatctgctatctgcaagagatcttcagcaacgagatggccaaggtggacgacagcttcttccacagactggaagagtccttcctggtggaagaggataagaagcacgagcggcaccccatcttcggcaacatcgtggacgaggtggcctaccacgagaagtaccccaccatctaccacctgagaaagaaactggtggacagcaccgacaaggccgacctgcggctgatctatctggccctggcccacatgatcaagttccggggccacttcctgatcgagggcgacctgaaccccgacaacagcgacgtggacaagctgttcatccagctggtgcagacctacaaccagctgttcgaggaaaaccccatcaacgccagcggcgtggacgccaaggccatcctgtctgccagactgagcaagagcagacggctggaaaatctgatcgcccagctgcccggcgagaagaagaatggcctgttcggcaacctgattgccctgagcctgggcctgacccccaacttcaagagcaacttcgacctggccgaggatgccaaactgcagctgagcaaggacacctacgacgacgacctggacaacctgctggcccagatcggcgaccagtacgccgacctgtttctggccgccaagaacctgtccgacgccatcctgctgagcgacatcctgagagtgaacaccgagatcaccaaggcccccctgagcgcctctatgatcaagagatacgacgagcaccaccaggacctgaccctgctgaaagctctcgtgcggcagcagctgcctgagaagtacaaagagattttcttcgaccagagcaagaacggctacgccggctacatcgatggcggagccagccaggaagagttctacaagttcatcaagcccatcctggaaaagatggacggcaccgaggaactgctcgtgaagctgaacagagaggacctgctgcggaagcagcggaccttcgacaacggcagcatcccccaccagatccacctgggagagctgcacgccattctgcggcggcaggaagatttttacccattcctgaaggacaaccgggaaaagatcgagaagatcctgaccttccgcatcccctactacgtgggccctctggccaggggaaacagcagattcgcctggatgaccagaaagagcgaggaaaccatcaccccctggaacttcgaggaagtggtggacaagggcgccagcgcccagagcttcatcgagcggatgaccaacttcgataagaacctgcccaacgagaaggtgctgcccaagcacagcctgctgtacgagtacttcaccgtgtacaacgagctgaccaaagtgaaatacgtgaccgagggaatgagaaagcccgccttcctgagcggcgagcagaaaaaagccatcgtggacctgctgttcaagaccaaccggaaagtgaccgtgaagcagctgaaagaggactacttcaagaaaatcgagtgcttcgactccgtggaaatctccggcgtggaagatcggttcaacgcctccctgggcacataccacgatctgctgaaaattatcaaggacaaggacttcctggacaatgaggaaaacgaggacattctggaagatatcgtgctgaccctgacactgtttgaggacagagagatgatcgaggaacggctgaaaacctatgcccacctgttcgacgacaaagtgatgaagcagctgaagcggcggagatacaccggctggggcaggctgagccggaagctgatcaacggcatccgggacaagcagtccggcaagacaatcctggatttcctgaagtccgacggcttcgccaacagaaacttcatgcagctgatccacgacgacagcctgacctttaaagaggacatccagaaagcccaggtgtccggccagggcgatagcctgcacgagcacattgccaatctggccggcagccccgccattaagaagggcatcctgcagacagtgaaggtggtggacgagctcgtgaaagtgatgggccggcacaagcccgagaacatcgtgatcgaaatggccagagagaaccagaccacccagaagggacagaagaacagccgcgagagaatgaagcggatcgaagagggcatcaaagagctgggcagccagatcctgaaagaacaccccgtggaaaacacccagctgcagaacgagaagctgtacctgtactacctgcagaatgggcgggatatgtacgtggaccaggaactggacatcaaccggctgtccgactacgatgtggacgctatcgtgcctcagagctttctgaaggacgactccatcgataacaaagtgctgactcggagcgacaagaaccggggcaagagcgacaacgtgccctccgaagaggtcgtgaagaagatgaagaactactggcgccagctgctgaatgccaagctgattacccagaggaagttcgacaatctgaccaaggccgagagaggcggcctgagcgaactggataaggccggcttcatcaagagacagctggtggaaacccggcagatcacaaagcacgtggcacagatcctggactcccggatgaacactaagtacgacgagaacgacaaactgatccgggaagtgaaagtgatcaccctgaagtccaagctggtgtccgatttccggaaggatttccagttttacaaagtgcgcgagatcaacaactaccaccacgcccacgacgcctacctgaacgccgtcgtgggaaccgccctgatcaaaaagtaccctaagctggaaagcgagttcgtgtacggcgactacaaggtgtacgacgtgcggaagatgatcgccaagagcgagcaggaaatcggcaaggctaccgccaagtacttcttctacagcaacatcatgaactttttcaagaccgagattaccctggccaacggcgagatccggaagcggcctctgatcgagacaaacggcgaaacaggcgagatcgtgtgggataagggccgggactttgccaccgtgcggaaagtgctgtctatgccccaagtgaatatcgtgaaaaagaccgaggtgcagacaggcggcttcagcaaagagtctatcctgcccaagaggaacagcgacaagctgatcgccagaaagaaggactgggaccctaagaagtacggcggcttcgacagccccaccgtggcctattctgtgctggtggtggccaaagtggaaaagggcaagtccaagaaactgaagagtgtgaaagagctgctggggatcaccatcatggaaagaagcagcttcgagaagaatcccatcgactttctggaagccaagggctacaaagaagtgaaaaaggacctgatcatcaagctgcctaagtactccctgttcgagctggaaaacggccggaagagaatgctggcctctgccggcgaactgcagaagggaaacgaactggccctgccctccaaatatgtgaacttcctgtacctggccagccactatgagaagctgaagggctcccccgaggataatgagcagaaacagctgtttgtggaacagcacaaacactacctggacgagatcatcgagcagatcagcgagttctccaagagagtgatcctggccgacgctaatctggacaaggtgctgagcgcctacaacaagcacagagacaagcctatcagagagcaggccgagaatatcatccacctgtttaccctgaccaatctgggagcccctgccgccttcaagtactttgacaccaccatcgaccggaagaggtacaccagcaccaaagaggtgctggacgccaccctgatccaccagagcatcaccggcctgtacgagacacggatcgacctgtctcagctgggaggcgacgcctatccctatgacgtgcccgattatgccagcctgggcagcggctcccccaagaaaaaacgcaaggtggaagatcctaagaaaaagcggaaagtggacggcggagggccgagctctggcgcacccccaccaagtggagggtctcctgccgggtccccaacatctactgaagaaggcaccagcgaatccgcaacgcccgagtcaggccctggtacctccacagaaccatctgaaggtagtgcgcctggttccccagctggaagccctacttccaccgaagaaggcacgtcaaccgaaccaagtgaaggatctgcccctgggaccagcactgaaccatctgagcggacactggtgaccttcaaggatgtatttgtggacttcaccagggaggagtggaagctgctggacactgctcagcagatcgtgtacagaaatgtgatgctggagaactataagaacctggtttccttgggttatcagcttactaagccagatgtgatcctccggttggagaagggagaagagcccagcggcagcgagacccccggtaccagcgagggcggccctagcagcggcgcccctccccctagcggcggcagccctgccggatcccctacaagcaccgaagaaggcacaagcgagtccgctacccctgagtccggccctggcacctccacagagcctagcgagggatccgctcctggatcccctgccggaagccctacctccaccgaggagggcacaagcaccgagccttccgagggcagcgcccccggaacaagcaccgaacctagcgagagcgccacccccgagagcatgttcgaaaccgtgcctgtgtggaggagacagccagtccgggtgctgtccctttttgaagacatcaagaaagagctgacgagtttgggctttttggaaagtggttctgacccgggacaactgaagcatgtggttgatgtcacagacacagtgaggaaggatgtggaggagtggggacccttcgatcttgtgtacggcgccacacctcccctgggccacacctgtgaccgtcctcccagctggtacctgttccagttccaccggctcctgcagtacgcacggcccaagccaggcagccccaggcccttcttctggatgttcgtggacaatctggtgctgaacaaggaagacctggacgtcgcatctcgcttcctggagatggagccagtcaccatcccagatgtccacggcggatccttgcagaatgctgtccgcgtgtggagcaacatcccagccataaggagcagcaggcactgggctctggtttcggaagaagaattgtccctgctggcccagaacaagcagagctcgaagctcgcggccaagtggcccaccaagctggtgaagaactgctttctccccctaagagaatatttcaagtatttttcaacagaactcacttcctctttatctagcggcaatagtaacgctaacagccgcgggccgagcttcagcagcggcctggtgccgttaagcttgcgcggcagccatatgaaccatgaccaggaatttgaccccccaaaggtttacccacctgtgccagctgagaagaggaagcccatccgcgtgctgtctctctttgatgggattgctacagggctcctggtgctgaaggacctgggcatccaagtggaccgctacattgcctccgaggtgtgtgaggactccatcacggtgggcatggtgcggcaccagggaaagatcatgtacgtcggggacgtccgcagcgtcacacagaagcatatccaggagtggggcccattcgacctggtgattggaggcagtccctgcaatgacctctccattgtcaaccctgcccgcaagggactttatgagggtactggccgcctcttctttgagttctaccgcctcctgcatgatgcgcggcccaaggagggagatgatcgccccttcttctggctctttgagaatgtggtggccatgggcgttagtgacaagagggacatctcgcgatttcttgagtctaaccccgtgatgattgacgccaaagaagtgtctgctgcacacagggcccgttacttctggggtaaccttcctggcatgaacaggcctttggcatccactgtgaatgataagctggagctgcaagagtgtctggagcacggcagaatagccaagttcagcaaagtgaggaccattaccaccaggtcaaactctataaagcagggcaaagaccagcatttccccgtcttcatgaacgagaaggaggacatcctgtggtgcactgaaatggaaagggtgtttggcttccccgtccactacacagacgtctccaacatgagccgcttggcgaggcagagactgctgggccgatcgtggagcgtgccggtcatccgccacctcttcgctccgctgaaggaatattttgcttgtgtgctcgagtaatga

SEQ ID NO: 214 - DNA, 6579 bp, synthetic construct
  misc_feature 1..6579: note = V29 CDS
  source 1..6579: mol_type = other DNA
atgccaaaaaagaagagaaaggtaatggacaagaagtacagcatcggcctggccatcggcaccaactctgtgggctgggccgtgatcaccgacgagtacaaggtgcccagcaagaaattcaaggtgctgggcaacaccgaccggcacagcatcaagaagaacctgatcggcgccctgctgttcgacagcggagaaacagccgaggccacccggctgaagagaaccgccagaagaagatacaccagacggaagaaccggatctgctatctgcaagagatcttcagcaacgagatggccaaggtggacgacagcttcttccacagactggaagagtccttcctggtggaagaggataagaagcacgagcggcaccccatcttcggcaacatcgtggacgaggtggcctaccacgagaagtaccccaccatctaccacctgagaaagaaactggtggacagcaccgacaaggccgacctgcggctgatctatctggccctggcccacatgatcaagttccggggccacttcctgatcgagggcgacctgaaccccgacaacagcgacgtggacaagctgttcatccagctggtgcagacctacaaccagctgttcgaggaaaaccccatcaacgccagcggcgtggacgccaaggccatcctgtctgccagactgagcaagagcagacggctggaaaatctgatcgcccagctgcccggcgagaagaagaatggcctgttcggcaacctgattgccctgagcctgggcctgacccccaacttcaagagcaacttcgacctggccgaggatgccaaactgcagctgagcaaggacacctacgacgacgacctggacaacctgctggcccagatcggcgaccagtacgccgacctgtttctggccgccaagaacctgtccgacgccatcctgctgagcgacatcctgagagtgaacaccgagatcaccaaggcccccctgagcgcctctatgatcaagagatacgacgagcaccaccaggacctgaccctgctgaaagctctcgtgcggcagcagctgcctgagaagtacaaagagattttcttcgaccagagcaagaacggctacgccggctacatcgatggcggagccagccaggaagagttctacaagttcatcaagcccatcctggaaaagatggacggcaccgaggaactgctcgtgaagctgaacagagaggacctgctgcggaagcagcggaccttcgacaacggcagcatcccccaccagatccacctgggagagctgcacgccattctgcggcggcaggaagatttttacccattcctgaaggacaaccgggaaaagatcgagaagatcctgaccttccgcatcccctactacgtgggccctctggccaggggaaacagcagattcgcctggatgaccagaaagagcgaggaaaccatcaccccctggaacttcgaggaagtggtggacaagggcgccagcgcccagagcttcatcgagcggatgaccaacttcgataagaacctgcccaacgagaaggtgctgcccaagcacagcctgctgtacgagtacttcaccgtgtacaacgagctgaccaaagtgaaatacgtgaccgagggaatgagaaagcccgccttcctgagcggcgagcagaaaaaagccatcgtggacctgctgttcaagaccaaccggaaagtgaccgtgaagcagctgaaagaggactacttcaagaaaatcgagtgcttcgactccgtggaaatctccggcgtggaagatcggttcaacgcctccctgggcacataccacgatctgctgaaaattatcaaggacaaggacttcctggacaatgaggaaaacgaggacattctggaagatatcgtgctgaccctgacactgtttgaggacagagagatgatcgaggaacggctgaaaacctatgcccacctgttcgacgacaaagtgatgaagcagctgaagcggcggagatacaccggctggggcaggctgagccggaagctgatcaacggcatccgggacaagcagtccggcaagacaatcctggatttcctgaagtccgacggcttcgccaacagaaacttcatgcagctgatccacgacgacagcctgacctttaaagaggacatccagaaagcccaggtgtccggccagggcgatagcctgcacgagcacattgccaatctggccggcagccccgccattaagaagggcatcctgcagacagtgaaggtggtggacgagctcgtgaaagtgatgggccggcacaagcccgagaacatcgtgatcgaaatggccagagagaaccagaccacccagaagggacagaagaacagccgcgagagaatgaagcggatcgaagagggcatcaaagagctgggcagccagatcctgaaagaacaccccgtggaaaacacccagctgcagaacgagaagctgtacctgtactacctgcagaatgggcgggatatgtacgtggaccaggaactggacatcaaccggctgtccgactacgatgtggacgctatcgtgcctcagagctttctgaaggacgactccatcgataacaaagtgctgactcggagcgacaagaaccggggcaagagcgacaacgtgccctccgaagaggtcgtgaagaagatgaagaactactggcgccagctgctgaatgccaagctgattacccagaggaagttcgacaatctgaccaaggccgagagaggcggcctgagcgaactggataaggccggcttcatcaagagacagctggtggaaacccggcagatcacaaagcacgtggcacagatcctggactcccggatgaacactaagtacgacgagaacgacaaactgatccgggaagtgaaagtgatcaccctgaagtccaagctggtgtccgatttccggaaggatttccagttttacaaagtgcgcgagatcaacaactaccaccacgcccacgacgcctacctgaacgccgtcgtgggaaccgccctgatcaaaaagtaccctaagctggaaagcgagttcgtgtacggcgactacaaggtgtacgacgtgcggaagatgatcgccaagagcgagcaggaaatcggcaaggctaccgccaagtacttcttctacagcaacatcatgaactttttcaagaccgagattaccctggccaacggcgagatccggaagcggcctctgatcgagacaaacggcgaaacaggcgagatcgtgtgggataagggccgggactttgccaccgtgcggaaagtgctgtctatgccccaagtgaatatcgtgaaaaagaccgaggtgcagacaggcggcttcagcaaagagtctatcctgcccaagaggaacagcgacaagctgatcgccagaaagaaggactgggaccctaagaagtacggcggcttcgacagccccaccgtggcctattctgtgctggtggtggccaaagtggaaaagggcaagtccaagaaactgaagagtgtgaaagagctgctggggatcaccatcatggaaagaagcagcttcgagaagaatcccatcgactttctggaagccaagggctacaaagaagtgaaaaaggacctgatcatcaagctgcctaagtactccctgttcgagctggaaaacggccggaagagaatgctggcctctgccggcgaactgcagaagggaaacgaactggccctgccctccaaatatgtgaacttcctgtacctggccagccactatgagaagctgaagggctcccccgaggataatgagcagaaacagctgtttgtggaacagcacaaacactacctggacgagatcatcgagcagatcagcgagttctccaagagagtgatcctggccgacgctaatctggacaaggtgctgagcgcctacaacaagcacagagacaagcctatcagagagcaggccgagaatatcatccacctgtttaccctgaccaatctgggagcccctgccgccttcaagtactttgacaccaccatcgaccggaagaggtacaccagcaccaaagaggtgctggacgccaccctgatccaccagagcatcaccggcctgtacgagacacggatcgacctgtctcagctgggaggcgacgcctatccctatgacgtgcccgattatgccagcctgggcagcggctcccccaagaaaaaacgcaaggtggaagatcctaagaaaaagcggaaagtggacggcggagggccgagctctggcgcacccccaccaagtggagggtctcctgccgggtccccaacatctactgaagaaggcaccagcgaatccgcaacgcccgagtcaggccctggtacctccacagaaccatctgaaggtagtgcgcctggttccccagctggaagccctacttccaccgaagaaggcacgtcaaccgaaccaagtgaaggatctgcccctgggaccagcactgaaccatctgagcggacactcgagctgttccgcgacgtggccattgtgttctctcaagaggaatggcagtggctggcccctgctcagagagatctctaccgcgacgttatgctggagacatactccaatctcgtgtccctcggcctggccgtgtccaaacctgatgtgatcagcttcctcgagcagggaaaagaaccttggatgagcggcagcgagacccccggtaccagcgagggcggccctagcagcggcgcccctccccctagcggcggcagccctgccggatcccctacaagcaccgaagaaggcacaagcgagtccgctacccctgagtccggccctggcacctccacagagcctagcgagggatccgctcctggatcccctgccggaagccctacctccaccgaggagggcacaagcaccgagccttccgagggcagcgcccccggaacaagcaccgaacctagcgagagcgccacccccgagagcatgttcgaaaccgtgcctgtgtggaggagacagccagtccgggtgctgtccctttttgaagacatcaagaaagagctgacgagtttgggctttttggaaagtggttctgacccgggacaactgaagcatgtggttgatgtcacagacacagtgaggaaggatgtggaggagtggggacccttcgatcttgtgtacggcgccacacctcccctgggccacacctgtgaccgtcctcccagctggtacctgttccagttccaccggctcctgcagtacgcacggcccaagccaggcagccccaggcccttcttctggatgttcgtggacaatctggtgctgaacaaggaagacctggacgtcgcatctcgcttcctggagatggagccagtcaccatcccagatgtccacggcggatccttgcagaatgctgtccgcgtgtggagcaacatcccagccataaggagcagcaggcactgggctctggtttcggaagaagaattgtccctgctggcccagaacaagcagagctcgaagctcgcggccaagtggcccaccaagctggtgaagaactgctttctccccctaagagaatatttcaagtatttttcaacagaactcacttcctctttatctagcggcaatagtaacgctaacagccgcgggccgagcttcagcagcggcctggtgccgttaagcttgcgcggcagccatatgaaccatgaccaggaatttgaccccccaaaggtttacccacctgtgccagctgagaagaggaagcccatccgcgtgctgtctctctttgatgggattgctacagggctcctggtgctgaaggacctgggcatccaagtggaccgctacattgcctccgaggtgtgtgaggactccatcacggtgggcatggtgcggcaccagggaaagatcatgtacgtcggggacgtccgcagcgtcacacagaagcatatccaggagtggggcccattcgacctggtgattggaggcagtccctgcaatgacctctccattgtcaaccctgcccgcaagggactttatgagggtactggccgcctcttctttgagttctaccgcctcctgcatgatgcgcggcccaaggagggagatgatcgccccttcttctggctctttgagaatgtggtggccatgggcgttagtgacaagagggacatctcgcgatttcttgagtctaaccccgtgatgattgacgccaaagaagtgtctgctgcacacagggcccgttacttctggggtaaccttcctggcatgaacaggcctttggcatccactgtgaatgataagctggagctgcaagagtgtctggagcacggcagaatagccaagttcagcaaagtgaggaccattaccaccaggtcaaactctataaagcagggcaaagaccagcatttccccgtcttcatgaacgagaaggaggacatcctgtggtgcactgaaatggaaagggtgtttggcttccccgtccactacacagacgtctccaacatgagccgcttggcgaggcagagactgctgggccgatcgtggagcgtgccggtcatccgccacctcttcgctccgctgaaggaatattttgcttgtgtgctcgagtaatga

SEQ ID NO: 215 - DNA, 6579 bp, synthetic construct
  misc_feature 1..6579: note = V30 CDS
  source 1..6579: mol_type = other DNA
atgccaaaaaagaagagaaaggtaatggacaagaagtacagcatcggcctggccatcggcaccaactctgtgggctgggccgtgatcaccgacgagtacaaggtgcccagcaagaaattcaaggtgctgggcaacaccgaccggcacagcatcaagaagaacctgatcggcgccctgctgttcgacagcggagaaacagccgaggccacccggctgaagagaaccgccagaagaagatacaccagacggaagaaccggatctgctatctgcaagagatcttcagcaacgagatggccaaggtggacgacagcttcttccacagactggaagagtccttcctggtggaagaggataagaagcacgagcggcaccccatcttcggcaacatcgtggacgaggtggcctaccacgagaagtaccccaccatctaccacctgagaaagaaactggtggacagcaccgacaaggccgacctgcggctgatctatctggccctggcccacatgatcaagttccggggccacttcctgatcgagggcgacctgaaccccgacaacagcgacgtggacaagctgttcatccagctggtgcagacctacaaccagctgttcgaggaaaaccccatcaacgccagcggcgtggacgccaaggccatcctgtctgccagactgagcaagagcagacggctggaaaatctgatcgcccagctgcccggcgagaagaagaatggcctgttcggcaacctgattgccctgagcctgggcctgacccccaacttcaagagcaacttcgacctggccgaggatgccaaactgcagctgagcaaggacacctacgacgacgacctggacaacctgctggcccagatcggcgaccagtacgccgacctgtttctggccgccaagaacctgtccgacgccatcctgctgagcgacatcctgagagtgaacaccgagatcaccaaggcccccctgagcgcctctatgatcaagagatacgacgagcaccaccaggacctgaccctgctgaaagctctcgtgcggcagcagctgcctgagaagtacaaagagattttcttcgaccagagcaagaacggctacgccggctacatcgatggcggagccagccaggaagagttctacaagttcatcaagcccatcctggaaaagatggacggcaccgaggaactgctcgtgaagctgaacagagaggacctgctgcggaagcagcggaccttcgacaacggcagcatcccccaccagatccacctgggagagctgcacgccattctgcggcggcaggaagatttttacccattcctgaaggacaaccgggaaaagatcgagaagatcctgaccttccgcatcccctactacgtgggccctctggccaggggaaacagcagattcgcctggatgaccagaaagagcgaggaaaccatcaccccctggaacttcgaggaagtggtggacaagggcgccagcgcccagagcttcatcgagcggatgaccaacttcgataagaacctgcccaacgagaaggtgctgcccaagcacagcctgctgtacgagtacttcaccgtgtacaacgagctgaccaaagtgaaatacgtgaccgagggaatgagaaagcccgccttcctgagcggcgagcagaaaaaagccatcgtggacctgctgttcaagaccaaccggaaagtgaccgtgaagcagctgaaagaggactacttcaagaaaatcgagtgcttcgactccgtggaaatctccggcgtggaagatcggttcaacgcctccctgggcacataccacgatctgctgaaaattatcaaggacaaggacttcctggacaatgaggaaaacgaggacattctggaagatatcgtgctgaccctgacactgtttgaggacagagagatgatcgaggaacggctgaaaacctatgcccacctgttcgacgacaaagtgatgaagcagctgaagcggcggagatacaccggctggggcaggctgagccggaagctgatcaacggcatccgggacaagcagtccggcaagacaatcctggatttcctgaagtccgacggcttcgccaacagaaacttcatgcagctgatccacgacgacagcctgacctttaaagaggacatccagaaagcccaggtgtccggccagggcgatagcctgcacgagcacattgccaatctggccggcagccccgccattaagaagggcatcctgcagacagtgaaggtggtggacgagctcgtgaaagtgatgggccggcacaagcccgagaacatcgtgatcgaaatggccagagagaaccagaccacccagaagggacagaagaacagccgcgagagaatgaagcggatcgaagagggcatcaaagagctgggcagccagatcctgaaagaacaccccgtggaaaacacccagctgcagaacgagaagctgtacctgtactacctgcagaatgggcgggatatgtacgtggaccaggaactggacatcaaccggctgtccgactacgatgtggacgctatcgtgcctcagagctttctgaaggacgactccatcgataacaaagtgctgactcggagcgacaagaaccggggcaagagcgacaacgtgccctccgaagaggtcgtgaagaagatgaagaactactggcgccagctgctgaatgccaagctgattacccagaggaagttcgacaatctgaccaaggccgagagaggcggcctgagcgaactggataaggccggcttcatcaagagacagctggtggaaacccggcagatcacaaagcacgtggcacagatcctggactcccggatgaacactaagtacgacgagaacgacaaactgatccgggaagtgaaagtgatcaccctgaagtccaagctggtgtccgatttccggaaggatttccagttttacaaagtgcgcgagatcaacaactaccaccacgcccacgacgcctacctgaacgccgtcgtgggaaccgccctgatcaaaaagtaccctaagctggaaagcgagttcgtgtacggcgactacaaggtgtacgacgtgcggaagatgatcgccaagagcgagcaggaaatcggcaaggctaccgccaagtacttcttctacagcaacatcatgaactttttcaagaccgagattaccctggccaacggcgagatccggaagcggcctctgatcgagacaaacggcgaaacaggcgagatcgtgtgggataagggccgggactttgccaccgtgcggaaagtgctgtctatgccccaagtgaatatcgtgaaaaagaccgaggtgcagacaggcggcttcagcaaagagtctatcctgcccaagaggaacagcgacaagctgatcgccagaaagaaggactgggaccctaagaagtacggcggcttcgacagccccaccgtggcctattctgtgctggtggtggccaaagtggaaaagggcaagtccaagaaactgaagagtgtgaaagagctgctggggatcaccatcatggaaagaagcagcttcgagaagaatcccatcgactttctggaagccaagggctacaaagaagtgaaaaaggacctgatcatcaagctgcctaagtactccctgttcgagctggaaaacggccggaagagaatgctggcctctgccggcgaactgcagaagggaaacgaactggccctgccctccaaatatgtgaacttcctgtacctggccagccactatgagaagctgaagggctcccccgaggataatgagcagaaacagctgtttgtggaacagcacaaacactacctggacgagatcatcgagcagatcagcgagttctccaagagagtgatcctggccgacgctaatctggacaaggtgctgagcgcctacaacaagcacagagacaagcctatcagagagcaggccgagaatatcatccacctgtttaccctgaccaatctgggagcccctgccgccttcaagtactttgacaccaccatcgaccggaagaggtacaccagcaccaaagaggtgctggacgccaccctgatccaccagagcatcaccggcctgtacgagacacggatcgacctgtctcagctgggaggcgacgcctatccctatgacgtgcccgattatgccagcctgggcagcggctcccccaagaaaaaacgcaaggtggaagatcctaagaaaaagcggaaagtggacggcggagggccgagctctggcgcacccccaccaagtggagggtctcctgccgggtccccaacatctactgaagaaggcaccagcgaatccgcaacgcccgagtcaggccctggtacctccacagaaccatctgaaggtagtgcgcctggttccccagctggaagccctacttccaccgaagaaggcacgtcaaccgaaccaagtgaaggatctgcccctgggaccagcactgaaccatctgagcggacactcatggcctttgaggacgtcgccgtgtatttttcccaagaagaatggggactgctcgacactgcccagagagccctgtatcgcagagtcatgctggacaacttcgccctggtggcctccctgggcctgtctacaagcagacccagagtggtcattcagctggaaagaggcgaggaaccctgggtcagcggcagcgagacccccggtaccagcgagggcggccctagcagcggcgcccctccccctagcggcggcagccctgccggatcccctacaagcaccgaagaaggcacaagcgagtccgctacccctgagtccggccctggcacctccacagagcctagcgagggatccgctcctggatcccctgccggaagccctacctccaccgaggagggcacaagcaccgagccttccgagggcagcgcccccggaacaagcaccgaacctagcgagagcgccacccccgagagcatgttcgaaaccgtgcctgtgtggaggagacagccagtccgggtgctgtccctttttgaagacatcaagaaagagctgacgagtttgggctttttggaaagtggttctgacccgggacaactgaagcatgtggttgatgtcacagacacagtgaggaaggatgtggaggagtggggacccttcgatcttgtgtacggcgccacacctcccctgggccacacctgtgaccgtcctcccagctggtacctgttccagttccaccggctcctgcagtacgcacggcccaagccaggcagccccaggcccttcttctggatgttcgtggacaatctggtgctgaacaaggaagacctggacgtcgcatctcgcttcctggagatggagccagtcaccatcccagatgtccacggcggatccttgcagaatgctgtccgcgtgtggagcaacatcccagccataaggagcagcaggcactgggctctggtttcggaagaagaattgtccctgctggcccagaacaagcagagctcgaagctcgcggccaagtggcccaccaagctggtgaagaactgctttctccccctaagagaatatttcaagtatttttcaacagaactcacttcctctttatctagcggcaatagtaacgctaacagccgcgggccgagcttcagcagcggcctggtgccgttaagcttgcgcggcagccatatgaaccatgaccaggaatttgaccccccaaaggtttacccacctgtgccagctgagaagaggaagcccatccgcgtgctgtctctctttgatgggattgctacagggctcctggtgctgaaggacctgggcatccaagtggaccgctacattgcctccgaggtgtgtgaggactccatcacggtgggcatggtgcggcaccagggaaagatcatgtacgtcggggacgtccgcagcgtcacacagaagcatatccaggagtggggcccattcgacctggtgattggaggcagtccctgcaatgacctctccattgtcaaccctgcccgcaagggactttatgagggtactggccgcctcttctttgagttctaccgcctcctgcatgatgcgcggcccaaggagggagatgatcgccccttcttctggctctttgagaatgtggtggccatgggcgttagtgacaagagggacatctcgcgatttcttgagtctaaccccgtgatgattgacgccaaagaagtgtctgctgcacacagggcccgttacttctggggtaaccttcctggcatgaacaggcctttggcatccactgtgaatgataagctggagctgcaagagtgtctggagcacggcagaatagccaagttcagcaaagtgaggaccattaccaccaggtcaaactctataaagcagggcaaagaccagcatttccccgtcttcatgaacgagaaggaggacatcctgtggtgcactgaaatggaaagggtgtttggcttccccgtccactacacagacgtctccaacatgagccgcttggcgaggcagagactgctgggccgatcgtggagcgtgccggtcatccgccacctcttcgctccgctgaaggaatattttgcttgtgtgctcgagtaatga

SEQ ID NO: 216 - DNA, 6612 bp, synthetic construct
  misc_feature 1..6612: note = V31 CDS
  source 1..6612: mol_type = other DNA
atgccaaaaaagaagagaaaggtaatggacaagaagtacagcatcggcctggccatcggcaccaactctgtgggctgggccgtgatcaccgacgagtacaaggtgcccagcaagaaattcaaggtgctgggcaacaccgaccggcacagcatcaagaagaacctgatcggcgccctgctgttcgacagcggagaaacagccgaggccacccggctgaagagaaccgccagaagaagatacaccagacggaagaaccggatctgctatctgcaagagatcttcagcaacgagatggccaaggtggacgacagcttcttccacagactggaagagtccttcctggtggaagaggataagaagcacgagcggcaccccatcttcggcaacatcgtggacgaggtggcctaccacgagaagtaccccaccatctaccacctgagaaagaaactggtggacagcaccgacaaggccgacctgcggctgatctatctggccctggcccacatgatcaagttccggggccacttcctgatcgagggcgacctgaaccccgacaacagcgacgtggacaagctgttcatccagctggtgcagacctacaaccagctgttcgaggaaaaccccatcaacgccagcggcgtggacgccaaggccatcctgtctgccagactgagcaagagcagacggctggaaaatctgatcgcccagctgcccggcgagaagaagaatggcctgttcggcaacctgattgccctgagcctgggcctgacccccaacttcaagagcaacttcgacctggccgaggatgccaaactgcagctgagcaaggacacctacgacgacgacctggacaacctgctggcccagatcggcgaccagtacgccgacctgtttctggccgccaagaacctgtccgacgccatcctgctgagcgacatcctgagagtgaacaccgagatcaccaaggcccccctgagcgcctctatgatcaagagatacgacgagcaccaccaggacctgaccctgctgaaagctctcgtgcggcagcagctgcctgagaagtacaaagagattttcttcgaccagagcaagaacggctacgccggctacatcgatggcggagccagccaggaagagttctacaagttcatcaagcccatcctggaaaagatggacggcaccgaggaactgctcgtgaagctgaacagagaggacctgctgcggaagcagcggaccttcgacaacggcagcatcccccaccagatccacctgggagagctgcacgccattctgcggcggcaggaagatttttacccattcctgaaggacaaccgggaaaagatcgagaagatcctgaccttccgcatcccctactacgtgggccctctggccaggggaaacagcagattcgcctggatgaccagaaagagcgaggaaaccatcaccccctggaacttcgaggaagtggtggacaagggcgccagcgcccagagcttcatcgagcggatgaccaacttcgataagaacctgcccaacgagaaggtgctgcccaagcacagcctgctgtacgagtacttcaccgtgtacaacgagctgaccaaagtgaaatacgtgaccgagggaatgagaaagcccgccttcctgagcggcgagcagaaaaaagccatcgtggacctgctgttcaagaccaaccggaaagtgaccgtgaagcagctgaaagaggactacttcaagaaaatcgagtgcttcgactccgtggaaatctccggcgtggaagatcggttcaacgcctccctgggcacataccacgatctgctgaaaattatcaaggacaaggacttcctggacaatgaggaaaacgaggacattctggaagatatcgtgctgaccctgacactgtttgaggacagagagatgatcgaggaacggctgaaaacctatgcccacctgttcgacgacaaagtgatgaagcagctgaagcggcggagatacaccggctggggcaggctgagccggaagctgatcaacggcatccgggacaagcagtccggcaagacaatcctggatttcctgaagtccgacggcttcgccaacagaaacttcatgcagctgatccacgacgacagcctgacctttaaagaggacatccagaaagcccaggtgtccggccagggcgatagcctgcacgagcacattgccaatctggccggcagccccgccattaagaagggcatcctgcagacagtgaaggtggtggacgagctcgtgaaagtgatgggccggcacaagcccgagaacatcgtgatcgaaatggccagagagaaccagaccacccagaagggacagaagaacagccgcgagagaatgaagcggatcgaagagggcatcaaagagctgggcagccagatcctgaaagaacaccccgtggaaaacacccagctgcagaacgagaagctgtacctgtactacctgcagaatgggcgggatatgtacgtggaccaggaactggacatcaaccggctgtccgactacgatgtggacgctatcgtgcctcagagctttctgaaggacgactccatcgataacaaagtgctgactcggagcgacaagaaccggggcaagagcgacaacgtgccctccgaagaggtcgtgaagaagatgaagaactactggcgccagctgctgaatgccaagctgattacccagaggaagttcgacaatctgaccaaggccgagagaggcggcctgagcgaactggataaggccggcttcatcaagagacagctggtggaaacccggcagatcacaaagcacgtggcacagatcctggactcccggatgaacactaagtacgacgagaacgacaaactgatccgggaagtgaaagtgatcaccctgaagtccaagctggtgtccgatttccggaaggatttccagttttacaaagtgcgcgagatcaacaactaccaccacgcccacgacgcctacctgaacgccgtcgtgggaaccgccctgatcaaaaagtaccctaagctggaaagcgagttcgtgtacggcgactacaaggtgtacgacgtgcggaagatgatcgccaagagcgagcaggaaatcggcaaggctaccgccaagtacttcttctacagcaacatcatgaactttttcaagaccgagattaccctggccaacggcgagatccggaagcggcctctgatcgagacaaacggcgaaacaggcgagatcgtgtgggataagggccgggactttgccaccgtgcggaaagtgctgtctatgccccaagtgaatatcgtgaaaaagaccgaggtgcagacaggcggcttcagcaaagagtctatcctgcccaagaggaacagcgacaagctgatcgccagaaagaaggactgggaccctaagaagtacggcggcttcgacagccccaccgtggcctattctgtgctggtggtggccaaagtggaaaagggcaagtccaagaaactgaagagtgtgaaagagctgctggggatcaccatcatggaaagaagcagcttcgagaagaatcccatcgactttctggaagccaagggctacaaagaagtgaaaaaggacctgatcatcaagctgcctaagtactccctgttcgagctggaaaacggccggaagagaatgctggcctctgccggcgaactgcagaagggaaacgaactggccctgccctccaaatatgtgaacttcctgtacctggccagccactatgagaagctgaagggctcccccgaggataatgagcagaaacagctgtttgtggaacagcacaaacactacctggacgagatcatcgagcagatcagcgagttctccaagagagtgatcctggccgacgctaatctggacaaggtgctgagcgcctacaacaagcacagagacaagcctatcagagagcaggccgagaatatcatccacctgtttaccctgaccaatctgggagcccctgccgccttcaagtactttgacaccaccatcgaccggaagaggtacaccagcaccaaagaggtgctggacgccaccctgatccaccagagcatcaccggcctgtacgagacacggatcgacctgtctcagctgggaggcgacgcctatccctatgacgtgcccgattatgccagcctgggcagcggctcccccaagaaaaaacgcaaggtggaagatcctaagaaaaagcggaaagtggacggcggagggccgagctctggcgcacccccaccaagtggagggtctcctgccgggtccccaacatctactgaagaaggcaccagcgaatccgcaacgcccgagtcaggccctggtacctccacagaaccatctgaaggtagtgcgcctggttccccagctggaagccctacttccaccgaagaaggcacgtcaaccgaaccaagtgaaggatctgcccctgggaccagcactgaaccatctgagggcagcggcagcgagacccccggtaccagcgagagcgccacccccgagagccggacactggtgaccttcaaggatgtatttgtggacttcaccagggaggagtggaagctgctggacactgctcagcagatcgtgtacagaaatgtgatgctggagaactataagaacctggtttccttgggttatcagcttactaagccagatgtgatcctccggttggagaagggagaagagcccagcggcagcgagacccccggtaccagcgagagcgctacacccgaatccggccccggcagccccgccggcagccctacaagcaccgaggagggcacctccgaatccgccacccctgagagcggacccggcagcgagcctgccacaagcggcagcgagacacctggaacaagcgagagcgccacacctgaaagcggccccggaacatccaccgagcctagcgagggcagcgcccctggcacaagcacagagccttccgagagcgccacccccgagagcatgttcgaaaccgtgcctgtgtggaggagacagccagtccgggtgctgtccctttttgaagacatcaagaaagagctgacgagtttgggctttttggaaagtggttctgacccgggacaactgaagcatgtggttgatgtcacagacacagtgaggaaggatgtggaggagtggggacccttcgatcttgtgtacggcgccacacctcccctgggccacacctgtgaccgtcctcccagctggtacctgttccagttccaccggctcctgcagtacgcacggcccaagccaggcagccccaggcccttcttctggatgttcgtggacaatctggtgctgaacaaggaagacctggacgtcgcatctcgcttcctggagatggagccagtcaccatcccagatgtccacggcggatccttgcagaatgctgtccgcgtgtggagcaacatcccagccataaggagcagcaggcactgggctctggtttcggaagaagaattgtccctgctggcccagaacaagcagagctcgaagctcgcggccaagtggcccaccaagctggtgaagaactgctttctccccctaagagaatatttcaagtatttttcaacagaactcacttcctctttatctagcggcaatagtaacgctaacagccgcgggccgagcttcagcagcggcctggtgccgttaagcttgcgcggcagccatatgaaccatgaccaggaatttgaccccccaaaggtttacccacctgtgccagctgagaagaggaagcccatccgcgtgctgtctctctttgatgggattgctacagggctcctggtgctgaaggacctgggcatccaagtggaccgctacattgcctccgaggtgtgtgaggactccatcacggtgggcatggtgcggcaccagggaaagatcatgtacgtcggggacgtccgcagcgtcacacagaagcatatccaggagtggggcccattcgacctggtgattggaggcagtccctgcaatgacctctccattgtcaaccctgcccgcaagggactttatgagggtactggccgcctcttctttgagttctaccgcctcctgcatgatgcgcggcccaaggagggagatgatcgccccttcttctggctctttgagaatgtggtggccatgggcgttagtgacaagagggacatctcgcgatttcttgagtctaaccccgtgatgattgacgccaaagaagtgtctgctgcacacagggcccgttacttctggggtaaccttcctggcatgaacaggcctttggcatccactgtgaatgataagctggagctgcaagagtgtctggagcacggcagaatagccaagttcagcaaagtgaggaccattaccaccaggtcaaactctataaagcagggcaaagaccagcatttccccgtcttcatgaacgagaaggaggacatcctgtggtgcactgaaatggaaagggtgtttggcttccccgtccactacacagacgtctccaacatgagccgcttggcgaggcagagactgctgggccgatcgtggagcgtgccggtcatccgccacctcttcgctccgctgaaggaatattttgcttgtgtgctcgagtaatga

SEQ ID NO: 217 - DNA, 6628 bp, synthetic construct
  misc_feature 1..6628: note = V32 CDS
  source 1..6628: mol_type = other DNA
atggtccctgctgctaagagagtgaaactggatggatccgacaagaagtacagcatcggcctggccatcggcaccaactctgtgggctgggccgtgatcaccgacgagtacaaggtgcccagcaagaaattcaaggtgctgggcaacaccgaccggcacagcatcaagaagaacctgatcggcgccctgctgttcgacagcggagaaacagccgaggccacccggctgaagagaaccgccagaagaagatacaccagacggaagaaccggatctgctatctgcaagagatcttcagcaacgagatggccaaggtggacgacagcttcttccacagactggaagagtccttcctggtggaagaggataagaagcacgagcggcaccccatcttcggcaacatcgtggacgaggtggcctaccacgagaagtaccccaccatctaccacctgagaaagaaactggtggacagcaccgacaaggccgacctgcggctgatctatctggccctggcccacatgatcaagttccggggccacttcctgatcgagggcgacctgaaccccgacaacagcgacgtggacaagctgttcatccagctggtgcagacctacaaccagctgttcgaggaaaaccccatcaacgccagcggcgtggacgccaaggccatcctgtctgccagactgagcaagagcagacggctggaaaatctgatcgcccagctgcccggcgagaagaagaatggcctgttcggcaacctgattgccctgagcctgggcctgacccccaacttcaagagcaacttcgacctggccgaggatgccaaactgcagctgagcaaggacacctacgacgacgacctggacaacctgctggcccagatcggcgaccagtacgccgacctgtttctggccgccaagaacctgtccgacgccatcctgctgagcgacatcctgagagtgaacaccgagatcaccaaggcccccctgagcgcctctatgatcaagagatacgacgagcaccaccaggacctgaccctgctgaaagctctcgtgcggcagcagctgcctgagaagtacaaagagattttcttcgaccagagcaagaacggctacgccggctacatcgatggcggagccagccaggaagagttctacaagttcatcaagcccatcctggaaaagatggacggcaccgaggaactgctcgtgaagctgaacagagaggacctgctgcggaagcagcggaccttcgacaacggcagcatcccccaccagatccacctgggagagctgcacgccattctgcggcggcaggaagatttttacccattcctgaaggacaaccgggaaaagatcgagaagatcctgaccttccgcatcccctactacgtgggccctctggccaggggaaacagcagattcgcctggatgaccagaaagagcgaggaaaccatcaccccctggaacttcgaggaagtggtggacaagggcgccagcgcccagagcttcatcgagcggatgaccaacttcgataagaacctgcccaacgagaaggtgctgcccaagcacagcctgctgtacgagtacttcaccgtgtacaacgagctgaccaaagtgaaatacgtgaccgagggaatgagaaagcccgccttcctgagcggcgagcagaaaaaagccatcgtggacctgctgttcaagaccaaccggaaagtgaccgtgaagcagctgaaagaggactacttcaagaaaatcgagtgcttcgactccgtggaaatctccggcgtggaagatcggttcaacgcctccctgggcacataccacgatctgctgaaaattatcaaggacaaggacttcctggacaatgaggaaaacgaggacattctggaagatatcgtgctgaccctgacactgtttgaggacagagagatgatcgaggaacggctgaaaacctatgcccacctgttcgacgacaaagtgatgaagcagctgaagcggcggagatacaccggctggggcaggctgagccggaagctgatcaacggcatccgggacaagcagtccggcaagacaatcctggatttcctgaagtccgacggcttcgccaacagaaacttcatgcagctgatccacgacgacagcctgacctttaaagaggacatccagaaagcccaggtgtccggccagggcgatagcctgcacgagcacattgccaatctggccggcagccccgccattaagaagggcatcctgcagacagtgaaggtggtggacgagctcgtgaaagtgatgggccggcacaagcccgagaacatcgtgatcgaaatggccagagagaaccagaccacccagaagggacagaagaacagccgcgagagaatgaagcggatcgaagagggcatcaaagagctgggcagccagatcctgaaagaacaccccgtggaaaacacccagctgcagaacgagaagctgtacctgtactacctgcagaatgggcgggatatgtacgtggaccaggaactggacatcaaccggctgtccgactacgatgtggacgctatcgtgcctcagagctttctgaaggacgactccatcgataacaaagtgctgactcggagcgacaagaaccggggcaagagcgacaacgtgccctccgaagaggtcgtgaagaagatgaagaactactggcgccagctgctgaatgccaagctgattacccagaggaagttcgacaatctgaccaaggccgagagaggcggcctgagcgaactggataaggccggcttcatcaagagacagctggtggaaacccggcagatcacaaagcacgtggcacagatcctggactcccggatgaacactaagtacgacgagaacgacaaactgatccgggaagtgaaagtgatcaccctgaagtccaagctggtgtccgatttccggaaggatttccagttttacaaagtgcgcgagatcaacaactaccaccacgcccacgacgcctacctgaacgccgtcgtgggaaccgccctgatcaaaaagtaccctaagctggaaagcgagttcgtgtacggcgactacaaggtgtacgacgtgcggaagatgatcgccaagagcgagcaggaaatcggcaaggctaccgccaagtacttcttctacagcaacatcatgaactttttcaagaccgagattaccctggccaacggcgagatccggaagcggcctctgatcgagacaaacggcgaaacaggcgagatcgtgtgggataagggccgggactttgccaccgtgcggaaagtgctgtctatgccccaagtgaatatcgtgaaaaagaccgaggtgcagacaggcggcttcagcaaagagtctatcctgcccaagaggaacagcgacaagctgatcgccagaaagaaggactgggaccctaagaagtacggcggcttcgacagccccaccgtggcctattctgtgctggtggtggccaaagtggaaaagggcaagtccaagaaactgaagagtgtgaaagagctgctggggatcaccatcatggaaagaagcagcttcgagaagaatcccatcgactttctggaagccaagggctacaaagaagtgaaaaaggacctgatcatcaagctgcctaagtactccctgttcgagctggaaaacggccggaagagaatgctggcctctgccggcgaactgcagaagggaaacgaactggccctgccctccaaatatgtgaacttcctgtacctggccagccactatgagaagctgaagggctcccccgaggataatgagcagaaacagctgtttgtggaacagcacaaacactacctggacgagatcatcgagcagatcagcgagttctccaagagagtgatcctggccgacgctaatctggacaaggtgctgagcgcctacaacaagcacagagacaagcctatcagagagcaggccgagaatatcatccacctgtttaccctgaccaatctgggagcccctgccgccttcaagtactttgacaccaccatcgaccggaagaggtacaccagcaccaaagaggtgctggacgccaccctgatccaccagagcatcaccggcctgtacgagacacggatcgacctgtctcagctgggaggcgacgcctatccctatgacgtgcccgattatgccagcctgggcagcggctcccccaagaaaaaacgcaaggtggaagatcctaagaaaaagcggaaagtggacggcggagggccgagctctggcgcacccccaccaagtggagggtctcctgccgggtccccaacatctactgaagaaggcaccagcgaatccgcaacgcccgagtcaggccctggtacctccacagaaccatctgaaggtagtgcgcctggttccccagctggaagccctacttccaccgaagaaggcacgtcaaccgaaccaagtgaaggatctgcccctgggaccagcactgaaccatctgagggcagcggcagcgagacccccggtaccagcgagagcgccacccccgagagcatgttcgaaaccgtgcctgtgtggaggagacagccagtccgggtgctgtccctttttgaagacatcaagaaagagctgacgagtttgggctttttggaaagtggttctgacccgggacaactgaagcatgtggttgatgtcacagacacagtgaggaaggatgtggaggagtggggacccttcgatcttgtgtacggcgccacacctcccctgggccacacctgtgaccgtcctcccagctggtacctgttccagttccaccggctcctgcagtacgcacggcccaagccaggcagccccaggcccttcttctggatgttcgtggacaatctggtgctgaacaaggaagacctggacgtcgcatctcgcttcctggagatggagccagtcaccatcccagatgtccacggcggatccttgcagaatgctgtccgcgtgtggagcaacatcccagccataaggagcagcaggcactgggctctggtttcggaagaagaattgtccctgctggcccagaacaagcagagctcgaagctcgcggccaagtggcccaccaagctggtgaagaactgctttctccccctaagagaatatttcaagtatttttcaacagaactcacttcctctttatctagcggcaatagtaacgctaacagccgcgggccgagcttcagcagcggcctggtgccgttaagcttgcgcggcagccatatgaaccatgaccaggaatttgaccccccaaaggtttacccacctgtgccagctgagaagaggaagcccatccgcgtgctgtctctctttgatgggattgctacagggctcctggtgctgaaggacctgggcatccaagtggaccgctacattgcctccgaggtgtgtgaggactccatcacggtgggcatggtgcggcaccagggaaagatcatgtacgtcggggacgtccgcagcgtcacacagaagcatatccaggagtggggcccattcgacctggtgattggaggcagtccctgcaatgacctctccattgtcaaccctgcccgcaagggactttatgagggtactggccgcctcttctttgagttctaccgcctcctgcatgatgcgcggcccaaggagggagatgatcgccccttcttctggctctttgagaatgtggtggccatgggcgttagtgacaagagggacatctcgcgatttcttgagtctaaccccgtgatgattgacgccaaagaagtgtctgctgcacacagggcccgttacttctggggtaaccttcctggcatgaacaggcctttggcatccactgtgaatgataagctggagctgcaagagtgtctggagcacggcagaatagccaagttcagcaaagtgaggaccattaccaccaggtcaaactctataaagcagggcaaagaccagcatttccccgtcttcatgaacgagaaggaggacatcctgtggtgcactgaaatggaaagggtgtttggcttccccgtccactacacagacgtctccaacatgagccgcttggcgaggcagagactgctgggccgatcgtggagcgtgccggtcatccgccacctcttcgctccgctgaaggaatattttgcttgtgtgagcggcagcgagacccccggtaccagcgagagcgctacacccgaatccggccccggcagccccgccggcagccctacaagcaccgaggagggcacctccgaatccgccacccctgagagcggacccggcagcgagcctgccacaagcggcagcgagacacctggaacaagcgagagcgccacacctgaaagcggccccggaacatccaccgagcctagcgagggcagcgcccctggcacaagcacagagccttccgagagcgccacccccgagagccggacactggtgaccttcaaggatgtatttgtggacttcaccagggaggagtggaagctgctggacactgctcagcagatcgtgtacagaaatgtgatgctggagaactataagaacctggtttccttgggttatcagcttactaagccagatgtgatcctccggttggagaagggagaagagcccctcgagtgataatagg

SEQ ID NO: 218 - DNA, 6669 bp, synthetic construct
  misc_feature 1..6669: note = V33 CDS
  source 1..6669: mol_type = other DNA
atgccaaaaaagaagagaaaggtaatggacaagaagtacagcatcggcctggccatcggcaccaactctgtgggctgggccgtgatcaccgacgagtacaaggtgcccagcaagaaattcaaggtgctgggcaacaccgaccggcacagcatcaagaagaacctgatcggcgccctgctgttcgacagcggagaaacagccgaggccacccggctgaagagaaccgccagaagaagatacaccagacggaagaaccggatctgctatctgcaagagatcttcagcaacgagatggccaaggtggacgacagcttcttccacagactggaagagtccttcctggtggaagaggataagaagcacgagcggcaccccatcttcggcaacatcgtggacgaggtggcctaccacgagaagtaccccaccatctaccacctgagaaagaaactggtggacagcaccgacaaggccgacctgcggctgatctatctggccctggcccacatgatcaagttccggggccacttcctgatcgagggcgacctgaaccccgacaacagcgacgtggacaagctgttcatccagctggtgcagacctacaaccagctgttcgaggaaaaccccatcaacgccagcggcgtggacgccaaggccatcctgtctgccagactgagcaagagcagacggctggaaaatctgatcgcccagctgcccggcgagaagaagaatggcctgttcggcaacctgattgccctgagcctgggcctgacccccaacttcaagagcaacttcgacctggccgaggatgccaaactgcagctgagcaaggacacctacgacgacgacctggacaacctgctggcccagatcggcgaccagtacgccgacctgtttctggccgccaagaacctgtccgacgccatcctgctgagcgacatcctgagagtgaacaccgagatcaccaaggcccccctgagcgcctctatgatcaagagatacgacgagcaccaccaggacctgaccctgctgaaagctctcgtgcggcagcagctgcctgagaagtacaaagagattttcttcgaccagagcaagaacggctacgccggctacatcgatggcggagccagccaggaagagttctacaagttcatcaagcccatcctggaaaagatggacggcaccgaggaactgctcgtgaagctgaacagagaggacctgctgcggaagcagcggaccttcgacaacggcagcatcccccaccagatccacctgggagagctgcacgccattctgcggcggcaggaagatttttacccattcctgaaggacaaccgggaaaagatcgagaagatcctgaccttccgcatcccctactacgtgggccctctggccaggggaaacagcagattcgcctggatgaccagaaagagcgaggaaaccatcaccccctggaacttcgaggaagtggtggacaagggcgccagcgcccagagcttcatcgagcggatgaccaacttcgataagaacctgcccaacgagaaggtgctgcccaagcacagcctgctgtacgagtacttcaccgtgtacaacgagctgaccaaagtgaaatacgtgaccgagggaatgagaaagcccgccttcctgagcggcgagcagaaaaaagccatcgtggacctgctgttcaagaccaaccggaaagtgaccgtgaagcagctgaaagaggactacttcaagaaaatcgagtgcttcgactccgtggaaatctccggcgtggaagatcggttcaacgcctccctgggcacataccacgatctgctgaaaattatcaaggacaaggacttcctggacaatgaggaaaacgaggacattctggaagatatcgtgctgaccctgacactgtttgaggacagagagatgatcgaggaacggctgaaaacctatgcccacctgttcgacgacaaagtgatgaagcagctgaagcggcggagatacaccggctggggcaggctgagccggaagctgatcaacggcatccgggacaagcagtccggcaagacaatcctggatttcctgaagtccgacggcttcgccaacagaaacttcatgcagctgatccacgacgacagcctgacctttaaagaggacatccagaaagcccaggtgtccggccagggcgatagcctgcacgagcacattgccaatctggccggcagccccgccattaagaagggcatcctgcagacagtgaaggtggtggacgagctcgtgaaagtgatgggccggcacaagcccgagaacatcgtgatcgaaatggccagagagaaccagaccacccagaagggacagaagaacagccgcgagagaatgaagcggatcgaagagggcatcaaagagctgggcagccagatcctgaaagaacaccccgtggaaaacacccagctgcagaacgagaagctgtacctgtactacctgcagaatgggcgggatatgtacgtggaccaggaactggacatcaaccggctgtccgactacgatgtggacgctatcgtgcctcagagctttctgaaggacgactccatcgataacaaagtgctgactcggagcgacaagaaccggggcaagagcgacaacgtgccctccgaagaggtcgtgaagaagatgaagaactactggcgccagctgctgaatgccaagctgattacccagaggaagttcgacaatctgaccaaggccgagagaggcggcctgagcgaactggataaggccggcttcatcaagagacagctggtggaaacccggcagatcacaaagcacgtggcacagatcctggactcccggatgaacactaagtacgacgagaacgacaaactgatccgggaagtgaaagtgatcaccctgaagtccaagctggtgtccgatttccggaaggatttccagttttacaaagtgcgcgagatcaacaactaccaccacgcccacgacgcctacctgaacgccgtcgtgggaaccgccctgatcaaaaagtaccctaagctggaaagcgagttcgtgtacggcgactacaaggtgtacgacgtgcggaagatgatcgccaagagcgagcaggaaatcggcaaggctaccgccaagtacttcttctacagcaacatcatgaactttttcaagaccgagattaccctggccaacggcgagatccggaagcggcctctgatcgagacaaacggcgaaacaggcgagatcgtgtgggataagggccgggactttgccaccgtgcggaaagtgctgtctatgccccaagtgaatatcgtgaaaaagaccgaggtgcagacaggcggcttcagcaaagagtctatcctgcccaagaggaacagcgacaagctgatcgccagaaagaaggactgggaccctaagaagtacggcggcttcgacagccccaccgtggcctattctgtgctggtggtggccaaagtggaaaagggcaagtccaagaaactgaagagtgtgaaagagctgctggggatcaccatcatggaaagaagcagcttcgagaagaatcccatcgactttctggaagccaagggctacaaagaagtgaaaaaggacctgatcatcaagctgcctaagtactccctgttcgagctggaaaacggccggaagagaatgctggcctctgccggcgaactgcagaagggaaacgaactggccctgccctccaaatatgtgaacttcctgtacctggccagccactatgagaagctgaagggctcccccgaggataatgagcagaaacagctgtttgtggaacagcacaaacactacctggacgagatcatcgagcagatcagcgagttctccaagagagtgatcctggccgacgctaatctggacaaggtgctgagcgcctacaacaagcacagagacaagcctatcagagagcaggccgagaatatcatccacctgtttaccctgaccaatctgggagcccctgccgccttcaagtactttgacaccaccatcgaccggaagaggtacaccagcaccaaagaggtgctggacgccaccctgatccaccagagcatcaccggcctgtacgagacacggatcgacctgtctcagctgggaggcgacgcctatccctatgacgtgcccgattatgccagcctgggcagcggctcccccaagaaaaaacgcaaggtggaagatcctaagaaaaagcggaaagtggacggcggagggccgagctctggcgcacccccaccaagtggagggtctcctgccgggtccccaacatctactgaagaaggcaccagcgaatccgcaacgcccgagtcaggccctggtacctccacagaaccatctgaaggtagtgcgcctggttccccagctggaagccctacttccaccgaagaaggcacgtcaaccgaaccaagtgaaggatctgcccctgggaccagcactgaaccatctgagatgaacaattcccagggaagagtgaccttcgaggacgtgaccgtgaacttcacccaaggcgagtggcagagactgaaccccgagcagagaaacctgtaccgggacgtgatgctggaaaactacagcaacctggtgtccgtcggccagggcgagacaacaaagcctgacgtgatcctgcggctggaacagggcaaagagccttggctggaagaggaagaggtgctcggatctggcagagccgagaagaatggcgatatcggcggacagatctggaagccaaaggatgtgaaagagagtctcagcggcagcgagacccccggtaccagcgagggcggccctagcagcggcgcccctccccctagcggcggcagccctgccggatcccctacaagcaccgaagaaggcacaagcgagtccgctacccctgagtccggccctggcacctccacagagcctagcgagggatccgctcctggatcccctgccggaagccctacctccaccgaggagggcacaagcaccgagccttccgagggcagcgcccccggaacaagcaccgaacctagcgagagcgccacccccgagagcggatccaaccatgaccaggaatttgaccccccaaaggtttacccacctgtgccagctgagaagaggaagcccatccgcgtgctgtctctctttgatgggattgctacagggctcctggtgctgaaggacctgggcatccaagtggaccgctacattgcctccgaggtgtgtgaggactccatcacggtgggcatggtgcggcaccagggaaagatcatgtacgtcggggacgtccgcagcgtcacacagaagcatatccaggagtggggcccattcgacctggtgattggaggcagtccctgcaatgacctctccattgtcaaccctgcccgcaagggactttatgagggtactggccgcctcttctttgagttctaccgcctcctgcatgatgcgcggcccaaggagggagatgatcgccccttcttctggctctttgagaatgtggtggccatgggcgttagtgacaagagggacatctcgcgatttcttgagtctaaccccgtgatgattgacgccaaagaagtgtctgctgcacacagggcccgttacttctggggtaaccttcctggcatgaacaggcctttggcatccactgtgaatgataagctggagctgcaagagtgtctggagcacggcagaatagccaagttcagcaaagtgaggaccattaccaccaggtcaaactctataaagcagggcaaagaccagcatttccccgtgttcatgaacgagaaggaggacatcctgtggtgcactgaaatggaaagggtgtttggcttccccgtccactacacagacgtctccaacatgagccgcttggcgaggcagagactgctgggccgatcgtggagcgtgccggtcatccgccacctcttcgctccgctgaaggaatattttgcttgtgtgtctagcggcaatagtaacgctaacagccgcgggccgagcttcagcagcggcctggtgccgttaagcttgcgcggcagccatatgttcgaaaccgtgcctgtgtggaggagacagccagtccgggtgctgtccctttttgaagacatcaagaaagagctgacgagtttgggctttttggaaagtggttctgacccgggacaactgaagcatgtggttgatgtcacagacacagtgaggaaggatgtggaggagtggggacccttcgatcttgtgtacggcgccacacctcccctgggccacacctgtgaccgtcctcccagctggtacctgttccagttccaccggctcctgcagtacgcacggcccaagccaggcagccccaggcccttcttctggatgttcgtggacaatctggtgctgaacaaggaagacctggacgtcgcatctcgcttcctggagatggagccagtcaccatcccagatgtccacggcggatccttgcagaatgctgtccgcgtgtggagcaacatcccagccataaggagcagcaggcactgggctctggtttcggaagaagaattgtccctgctggcccagaacaagcagagctcgaagctcgcggccaagtggcccaccaagctggtgaagaactgctttctccccctaagagaatatttcaagtatttttcaatgcattaatga

SEQ ID NO: 219 - DNA, 7281 bp, synthetic construct
  misc_feature 1..7281: note = V34 CDS
  source 1..7281: mol_type = other DNA
atgccaaaaaagaagagaaaggtaatggacaagaagtacagcatcggcctggccatcggcaccaactctgtgggctgggccgtgatcaccgacgagtacaaggtgcccagcaagaaattcaaggtgctgggcaacaccgaccggcacagcatcaagaagaacctgatcggcgccctgctgttcgacagcggagaaacagccgaggccacccggctgaagagaaccgccagaagaagatacaccagacggaagaaccggatctgctatctgcaagagatcttcagcaacgagatggccaaggtggacgacagcttcttccacagactggaagagtccttcctggtggaagaggataagaagcacgagcggcaccccatcttcggcaacatcgtggacgaggtggcctaccacgagaagtaccccaccatctaccacctgagaaagaaactggtggacagcaccgacaaggccgacctgcggctgatctatctggccctggcccacatgatcaagttccggggccacttcctgatcgagggcgacctgaaccccgacaacagcgacgtggacaagctgttcatccagctggtgcagacctacaaccagctgttcgaggaaaaccccatcaacgccagcggcgtggacgccaaggccatcctgtctgccagactgagcaagagcagacggctggaaaatctgatcgcccagctgcccggcgagaagaagaatggcctgttcggcaacctgattgccctgagcctgggcctgacccccaacttcaagagcaacttcgacctggccgaggatgccaaactgcagctgagcaaggacacctacgacgacgacctggacaacctgctggcccagatcggcgaccagtacgccgacctgtttctggccgccaagaacctgtccgacgccatcctgctgagcgacatcctgagagtgaacaccgagatcaccaaggcccccctgagcgcctctatgatcaagagatacgacgagcaccaccaggacctgaccctgctgaaagctctcgtgcggcagcagctgcctgagaagtacaaagagattttcttcgaccagagcaagaacggctacgccggctacatcgatggcggagccagccaggaagagttctacaagttcatcaagcccatcctggaaaagatggacggcaccgaggaactgctcgtgaagctgaacagagaggacctgctgcggaagcagcggaccttcgacaacggcagcatcccccaccagatccacctgggagagctgcacgccattctgcggcggcaggaagatttttacccattcctgaaggacaaccgggaaaagatcgagaagatcctgaccttccgcatcccctactacgtgggccctctggccaggggaaacagcagattcgcctggatgaccagaaagagcgaggaaaccatcaccccctggaacttcgaggaagtggtggacaagggcgccagcgcccagagcttcatcgagcggatgaccaacttcgataagaacctgcccaacgagaaggtgctgcccaagcacagcctgctgtacgagtacttcaccgtgtacaacgagctgaccaaagtgaaatacgtgaccgagggaatgagaaagcccgccttcctgagcggcgagcagaaaaaagccatcgtggacctgctgttcaagaccaaccggaaagtgaccgtgaagcagctgaaagaggactacttcaagaaaatcgagtgcttcgactccgtggaaatctccggcgtggaagatcggttcaacgcctccctgggcacataccacgatctgctgaaaattatcaaggacaaggacttcctggacaatgaggaaaacgaggacattctggaagatatcgtgctgaccctgacactgtttgaggacagagagatgatcgaggaacggctgaaaacctatgcccacctgttcgacgacaaagtgatgaagcagctgaagcggcggagatacaccggctggggcaggctgagccggaagctgatcaacggcatccgggacaagcagtccggcaagacaatcctggatttcctgaagtccgacggcttcgccaacagaaacttcatgcagctgatccacgacgacagcctgacctttaaagaggacatccagaaagcccaggtgtccggccagggcgatagcctgcacgagcacattgccaatctggccggcagccccgccattaagaagggcatcctgcagacagtgaaggtggtggacgagctcgtgaaagtgatgggccggcacaagcccgagaacatcgtgatcgaaatggccagagagaaccagaccacccagaagggacagaagaacagccgcgagagaatgaagcggatcgaagagggcatcaaagagctgggcagccagatcctgaaagaacaccccgtggaaaacacccagctgcagaacgagaagctgtacctgtactacctgcagaatgggcgggatatgtacgtggaccaggaactggacatcaaccggctgtccgactacgatgtggacgctatcgtgcctcagagctttctgaaggacgactccatcgataacaaagtgctgactcggagcgacaagaaccggggcaagagcgacaacgtgccctccgaagaggtcgtgaagaagatgaagaactactggcgccagctgctgaatgccaagctgattacccagaggaagttcgacaatctgaccaaggccgagagaggcggcctgagcgaactggataaggccggcttcatcaagagacagctggtggaaacccggcagatcacaaagcacgtggcacagatcctggactcccggatgaacactaagtacgacgagaacgacaaactgatccgggaagtgaaagtgatcaccctgaagtccaagctggtgtccgatttccggaaggatttccagttttacaaagtgcgcgagatcaacaactaccaccacgcccacgacgcctacctgaacgccgtcgtgggaaccgccctgatcaaaaagtaccctaagctggaaagcgagttcgtgtacggcgactacaaggtgtacgacgtgcggaagatgatcgccaagagcgagcaggaaatcggcaaggctaccgccaagtacttcttctacagcaacatcatgaactttttcaagaccgagattaccctggccaacggcgagatccggaagcggcctctgatcgagacaaacggcgaaacaggcgagatcgtgtgggataagggccgggactttgccaccgtgcggaaagtgctgtctatgccccaagtgaatatcgtgaaaaagaccgaggtgcagacaggcggcttcagcaaagagtctatcctgcccaagaggaacagcgacaagctgatcgccagaaagaaggactgggaccctaagaagtacggcggcttcgacagccccaccgtggcctattctgtgctggtggtggccaaagtggaaaagggcaagtccaagaaactgaagagtgtgaaagagctgctggggatcaccatcatggaaagaagcagcttcgagaagaatcccatcgactttctggaagccaagggctacaaagaagtgaaaaaggacctgatcatcaagctgcctaagtactccctgttcgagctggaaaacggccggaagagaatgctggcctctgccggcgaactgcagaagggaaacgaactggccctgccctccaaatatgtgaacttcctgtacctggccagccactatgagaagctgaagggctcccccgaggataatgagcagaaacagctgtttgtggaacagcacaaacactacctggacgagatcatcgagcagatcagcgagttctccaagagagtgatcctggccgacgctaatctggacaaggtgctgagcgcctacaacaagcacagagacaagcctatcagagagcaggccgagaatatcatccacctgtttaccctgaccaatctgggagcccctgccgccttcaagtactttgacaccaccatcgaccggaagaggtacaccagcaccaaagaggtgctggacgccaccctgatccaccagagcatcaccggcctgtacgagacacggatcgacctgtctcagctgggaggcgacgcctatccctatgacgtgcccgattatgccagcctgggcagcggctcccccaagaaaaaacgcaaggtggaagatcctaagaaaaagcggaaagtggacggcggagggccgagctctggcgcacccccaccaagtggagggtctcctgccgggtccccaacatctactgaagaaggcaccagcgaatccgcaacgcccgagtcaggccctggtacccatgtgagcgagctgattaaggagaacatgcacatgaagctgtacatggagggcaccgtggacaaccatcacttcaagtgcacatccgagggcgaaggcaagccctacgagggcacccagaccatgagaatcaaggtggtcgagggcggccctctccccttcgccttcgacatcctggctactagcttcctctacggcagcaagaccttcatcaaccacacccagggcatccccgacttcttcaagcagtccttccctgagggcttcacatgggagagagtcaccacatacgaagacgggggcgtgctgaccgctacccaggacaccagcctccaggacggctgcctcatctacaacgtcaagatcagaggggtgaacttcacatccaacggccctgtgatgcagaagaaaacactcggctgggaggccttcaccgaaacgctgtaccccgctgacggcggcctggaaggcagaaacgacatggccctgaagctcgtgggcgggagccatctgatcgcaaacatcaagaccacatatagatccaagaaacccgctaagaacctcaagatgcctggcgtctactatgtggactacagactggaaagaatcaaggaggccaacaacgagacctacgtcgagcagcacgaggtggcagtggccagatactgcgacctccctagcaaactggggcacaagcttaatggatctgcccctgggaccagcactgaaccatctgagatgaacaattcccagggaagagtgaccttcgaggacgtgaccgtgaacttcacccaaggcgagtggcagagactgaaccccgagcagagaaacctgtaccgggacgtgatgctggaaaactacagcaacctggtgtccgtcggccagggcgagacaacaaagcctgacgtgatcctgcggctggaacagggcaaagagccttggctggaagaggaagaggtgctcggatctggcagagccgagaagaatggcgatatcggcggacagatctggaagccaaaggatgtgaaagagagtctcagcggcagcgagacccccggtaccagcgagggcggccctagcagcggcgcccctccccctagcggcggcagccctgccggatcccctacaagcaccgaagaaggcacaagcgagtccgctacccctgagtccggccctggcacctccacagagcctagcgagggatccgctcctggatcccctgccggaagccctacctccaccgaggagggcacaagcaccgagccttccgagggcagcgcccccggaacaagcaccgaacctagcgagagcgccacccccgagagcggatccaaccatgaccaggaatttgaccccccaaaggtttacccacctgtgccagctgagaagaggaagcccatccgcgtgctgtctctctttgatgggattgctacagggctcctggtgctgaaggacctgggcatccaagtggaccgctacattgcctccgaggtgtgtgaggactccatcacggtgggcatggtgcggcaccagggaaagatcatgtacgtcggggacgtccgcagcgtcacacagaagcatatccaggagtggggcccattcgacctggtgattggaggcagtccctgcaatgacctctccattgtcaaccctgcccgcaagggactttatgagggtactggccgcctcttctttgagttctaccgcctcctgcatgatgcgcggcccaaggagggagatgatcgccccttcttctggctctttgagaatgtggtggccatgggcgttagtgacaagagggacatctcgcgatttcttgagtctaaccccgtgatgattgacgccaaagaagtgtctgctgcacacagggcccgttacttctggggtaaccttcctggcatgaacaggcctttggcatccactgtgaatgataagctggagctgcaagagtgtctggagcacggcagaatagccaagttcagcaaagtgaggaccattaccaccaggtcaaactctataaagcagggcaaagaccagcatttccccgtgttcatgaacgagaaggaggacatcctgtggtgcactgaaatggaaagggtgtttggcttccccgtccactacacagacgtctccaacatgagccgcttggcgaggcagagactgctgggccgatcgtggagcgtgccggtcatccgccacctcttcgctccgctgaaggaatattttgcttgtgtgtctagcggcaatagtaacgctaacagccgcgggccgagcttcagcagcggcctggtgccgttaagcttgcgcggcagccatatgttcgaaaccgtgcctgtgtggaggagacagccagtccgggtgctgtccctttttgaagacatcaagaaagagctgacgagtttgggctttttggaaagtggttctgacccgggacaactgaagcatgtggttgatgtcacagacacagtgaggaaggatgtggaggagtggggacccttcgatcttgtgtacggcgccacacctcccctgggccacacctgtgaccgtcctcccagctggtacctgttccagttccaccggctcctgcagtacgcacggcccaagccaggcagccccaggcccttcttctggatgttcgtggacaatctggtgctgaacaaggaagacctggacgtcgcatctcgcttcctggagatggagccagtcaccatcccagatgtccacggcggatccttgcagaatgctgtccgcgtgtggagcaacatcccagccataaggagcagcaggcactgggctctggtttcggaagaagaattgtccctgctggcccagaacaagcagagctcgaagctcgcggccaagtggcccaccaagctggtgaagaactgctttctccccctaagagaatatttcaagtatttttcaatgcattaatga

SEQ ID NO: 220 - DNA, 7299 bp, synthetic construct
  misc_feature 1..7299: note = V35 CDS
  source 1..7299: mol_type = other DNA
atgccaaaaaagaagagaaaggtaatggacaagaagtacagcatcggcctggccatcggcaccaactctgtgggctgggccgtgatcaccgacgagtacaaggtgcccagcaagaaattcaaggtgctgggcaacaccgaccggcacagcatcaagaagaacctgatcggcgccctgctgttcgacagcggagaaacagccgaggccacccggctgaagagaaccgccagaagaagatacaccagacggaagaaccggatctgctatctgcaagagatcttcagcaacgagatggccaaggtggacgacagcttcttccacagactggaagagtccttcctggtggaagaggataagaagcacgagcggcaccccatcttcggcaacatcgtggacgaggtggcctaccacgagaagtaccccaccatctaccacctgagaaagaaactggtggacagcaccgacaaggccgacctgcggctgatctatctggccctggcccacatgatcaagttccggggccacttcctgatcgagggcgacctgaaccccgacaacagcgacgtggacaagctgttcatccagctggtgcagacctacaaccagctgttcgaggaaaaccccatcaacgccagcggcgtggacgccaaggccatcctgtctgccagactgagcaagagcagacggctggaaaatctgatcgcccagctgcccggcgagaagaagaatggcctgttcggcaacctgattgccctgagcctgggcctgacccccaacttcaagagcaacttcgacctggccgaggatgccaaactgcagctgagcaaggacacctacgacgacgacctggacaacctgctggcccagatcggcgaccagtacgccgacctgtttctggccgccaagaacctgtccgacgccatcctgctgagcgacatcctgagagtgaacaccgagatcaccaaggcccccctgagcgcctctatgatcaagagatacgacgagcaccaccaggacctgaccctgctgaaagctctcgtgcggcagcagctgcctgagaagtacaaagagattttcttcgaccagagcaagaacggctacgccggctacatcgatggcggagccagccaggaagagttctacaagttcatcaagcccatcctggaaaagatggacggcaccgaggaactgctcgtgaagctgaacagagaggacctgctgcggaagcagcggaccttcgacaacggcagcatcccccaccagatccacctgggagagctgcacgccattctgcggcggcaggaagatttttacccattcctgaaggacaaccgggaaaagatcgagaagatcctgaccttccgcatcccctactacgtgggccctctggccaggggaaacagcagattcgcctggatgaccagaaagagcgaggaaaccatcaccccctggaacttcgaggaagtggtggacaagggcgccagcgcccagagcttcatcgagcggatgaccaacttcgataagaacctgcccaacgagaaggtgctgcccaagcacagcctgctgtacgagtacttcaccgtgtacaacgagctgaccaaagtgaaatacgtgaccgagggaatgagaaagcccgccttcctgagcggcgagcagaaaaaagccatcgtggacctgctgttcaagaccaaccggaaagtgaccgtgaagcagctgaaagaggactacttcaagaaaatcgagtgcttcgactccgtggaaatctccggcgtggaagatcggttcaacgcctccctgggcacataccacgatctgctgaaaattatcaaggacaaggacttcctggacaatgaggaaaacgaggacattctggaagatatcgtgctgaccctgacactgtttgaggacagagagatgatcgaggaacggctgaaaacctatgcccacctgttcgacgacaaagtgatgaagcagctgaagcggcggagatacaccggctggggcaggctgagccggaagctgatcaacggcatccgggacaagcagtccggcaagacaatcctggatttcctgaagtccgacggcttcgccaacagaaacttcatgcagctgatccacgacgacagcctgacctttaaagaggacatccagaaagcccaggtgtccggccagggcgatagcctgcacgagcacattgccaatctggccggcagccccgccattaagaagggcatcctgcagacagtgaaggtggtggacgagctcgtgaaagtgatgggccggcacaagcccgagaacatcgtgatcgaaatggccagagagaaccagaccacccagaagggacagaagaacagccgcgagagaatgaagcggatcgaagagggcatcaaagagctgggcagccagatcctgaaagaacaccccgtggaaaacacccagctgcagaacgagaagctgtacctgtactacctgcagaatgggcgggatatgtacgtggaccaggaactggacatcaaccggctgtccgactacgatgtggacgctatcgtgcctcagagctttctgaaggacgactccatcgataacaaagtgctgactcggagcgacaagaaccggggcaagagcgacaacgtgccctccgaagaggtcgtgaagaagatgaagaactactggcgccagctgctgaatgccaagctgattacccagaggaagttcgacaatctgaccaaggccgagagaggcggcctgagcgaactggataaggccggcttcatcaagagacagctggtggaaacccggcagatcacaaagcacgtggcacagatcctggactcccggatgaacactaagtacgacgagaacgacaaactgatccgggaagtgaaagtgatcaccctgaagtccaagctggtgtccgatttccggaaggatttccagttttacaaagtgcgcgagatcaacaactaccaccacgcccacgacgcctacctgaacgccgtcgtgggaaccgccctgatcaaaaagtaccctaagctggaaagcgagttcgtgtacggcgactacaaggtgtacgacgtgcggaagatgatcgccaagagcgagcaggaaatcggcaaggctaccgccaagtacttcttctacagcaacatcatgaactttttcaagaccgagattaccctggccaacggcgagatccggaagcggcctctgatcgagacaaacggcgaaacaggcgagatcgtgtgggataagggccgggactttgccaccgtgcggaaagtgctgtctatgccccaagtgaatatcgtgaaaaagaccgaggtgcagacaggcggcttcagcaaagagtctatcctgcccaagaggaacagcgacaagctgatcgccagaaagaaggactgggaccctaagaagtacggcggcttcgacagccccaccgtggcctattctgtgctggtggtggccaaagtggaaaagggcaagtccaagaaactgaagagtgtgaaagagctgctggggatcaccatcatggaaagaagcagcttcgagaagaatcccatcgactttctggaagccaagggctacaaagaagtgaaaaaggacctgatcatcaagctgcctaagtactccctgttcgagctggaaaacggccggaagagaatgctggcctctgccggcgaactgcagaagggaaacgaactggccctgccctccaaatatgtgaacttcctgtacctggccagccactatgagaagctgaagggctcccccgaggataatgagcagaaacagctgtttgtggaacagcacaaacactacctggacgagatcatcgagcagatcagcgagttctccaagagagtgatcctggccgacgctaatctggacaaggtgctgagcgcctacaacaagcacagagacaagcctatcagagagcaggccgagaatatcatccacctgtttaccctgaccaatctgggagcccctgccgccttcaagtactttgacaccaccatcgaccggaagaggtacaccagcaccaaagaggtgctggacgccaccctgatccaccagagcatcaccggcctgtacgagacacggatcgacctgtctcagctgggaggcgacgcctatccctatgacgtgcccgattatgccagcctgggcagcggctcccccaagaaaaaacgcaaggtggaagatcctaagaaaaagcggaaagtggacggcggagggccgagctctggcgcacccccaccaagtggagggtctcctgccgggtccccaacatctactgaagaaggcaccagcgaatccgcaacgcccgagtcaggccctggtacccatgtgagcgagctgattaaggagaacatgcacatgaagctgtacatggagggcaccgtggacaaccatcacttcaagtgcacatccgagggcgaaggcaagccctacgagggcacccagaccatgagaatcaaggtggtcgagggcggccctctccccttcgccttcgacatcctggctactagcttcctctacggcagcaagaccttcatcaaccacacccagggcatccccgacttcttcaagcagtccttccctgagggcttcacatgggagagagtcaccacatacgaagacgggggcgtgctgaccgctacccaggacaccagcctccaggacggctgcctcatctacaacgtcaagatcagaggggtgaacttcacatccaacggccctgtgatgcagaagaaaacactcggctgggaggccttcaccgaaacgctgtaccccgctgacggcggcctggaaggcagaaacgacatggccctgaagctcgtgggcgggagccatctgatcgcaaacatcaagaccacatatagatccaagaaacccgctaagaacctcaagatgcctggcgtctactatgtggactacagactggaaagaatcaaggaggccaacaacgagacctacgtcgagcagcacgaggtggcagtggccagatactgcgacctccctagcaaactggggcacaagcttaatggatctgcccctgggaccagcactgaaccatctgagatgaacaattcccagggaagagtgaccttcgaggacgtgaccgtgaacttcacccaaggcgagtggcagagactgaaccccgagcagagaaacctgtaccgggacgtgatgctggaaaactacagcaacctggtgtccgtcggccagggcgagacaacaaagcctgacgtgatcctgcggctggaacagggcaaagagccttggctggaagaggaagaggtgctcggatctggcagagccgagaagaatggcgatatcggcggacagatctggaagccaaaggatgtgaaagagagtctcagcggcagcgagacccccggtaccagcgagggcggccctagcagcggcgcccctccccctagcggcggcagccctgccggatcccctacaagcaccgaagaaggcacaagcgagtccgctacccctgagtccggccctggcacctccacagagcctagcgagggatccgctcctggatcccctgccggaagccctacctccaccgaggagggcacaagcaccgagccttccgagggcagcgcccccggaacaagcaccgaacctagcgagagcgccacccccgagagcatgttcgaaaccgtgcctgtgtggaggagacagccagtccgggtgctgtccctttttgaagacatcaagaaagagctgacgagtttgggctttttggaaagtggttctgacccgggacaactgaagcatgtggttgatgtcacagacacagtgaggaaggatgtggaggagtggggacccttcgatcttgtgtacggcgccacacctcccctgggccacacctgtgaccgtcctcccagctggtacctgttccagttccaccggctcctgcagtacgcacggcccaagccaggcagccccaggcccttcttctggatgttcgtggacaatctggtgctgaacaaggaagacctggacgtcgcatctcgcttcctggagatggagccagtcaccatcccagatgtccacggcggatccttgcagaatgctgtccgcgtgtggagcaacatcccagccataaggagcagcaggcactgggctctggtttcggaagaagaattgtccctgctggcccagaacaagcagagctcgaagctcgcggccaagtggcccaccaagctggtgaagaactgctttctccccctaagagaatatttcaagtatttttcaacagaactcacttcctctttatctagcggcaatagtaacgctaacagccgcgggccgagcttcagcagcggcctggtgccgttaagcttgcgcggcagccatatgaaccatgaccaggaatttgaccccccaaaggtttacccacctgtgccagctgagaagaggaagcccatccgcgtgctgtctctctttgatgggattgctacagggctcctggtgctgaaggacctgggcatccaagtggaccgctacattgcctccgaggtgtgtgaggactccatcacggtgggcatggtgcggcaccagggaaagatcatgtacgtcggggacgtccgcagcgtcacacagaagcatatccaggagtggggcccattcgacctggtgattggaggcagtccctgcaatgacctctccattgtcaaccctgcccgcaagggactttatgagggtactggccgcctcttctttgagttctaccgcctcctgcatgatgcgcggcccaaggagggagatgatcgccccttcttctggctctttgagaatgtggtggccatgggcgttagtgacaagagggacatctcgcgatttcttgagtctaaccccgtgatgattgacgccaaagaagtgtctgctgcacacagggcccgttacttctggggtaaccttcctggcatgaacaggcctttggcatccactgtgaatgataagctggagctgcaagagtgtctggagcacggcagaatagccaagttcagcaaagtgaggaccattaccaccaggtcaaactctataaagcagggcaaagaccagcatttccccgtcttcatgaacgagaaggaggacatcctgtggtgcactgaaatggaaagggtgtttggcttccccgtccactacacagacgtctccaacatgagccgcttggcgaggcagagactgctgggccgatcgtggagcgtgccggtcatccgccacctcttcgctccgctgaaggaatattttgcttgtgtgctcgagtaatga

SEQ ID NO: 221 - DNA, 7191 bp, synthetic construct
  misc_feature 1..7191: note = V36 CDS
  source 1..7191: mol_type = other DNA
atgccaaaaaagaagagaaaggtaatggacaagaagtacagcatcggcctggccatcggcaccaactctgtgggctgggccgtgatcaccgacgagtacaaggtgcccagcaagaaattcaaggtgctgggcaacaccgaccggcacagcatcaagaagaacctgatcggcgccctgctgttcgacagcggagaaacagccgaggccacccggctgaagagaaccgccagaagaagatacaccagacggaagaaccggatctgctatctgcaagagatcttcagcaacgagatggccaaggtggacgacagcttcttccacagactggaagagtccttcctggtggaagaggataagaagcacgagcggcaccccatcttcggcaacatcgtggacgaggtggcctaccacgagaagtaccccaccatctaccacctgagaaagaaactggtggacagcaccgacaaggccgacctgcggctgatctatctggccctggcccacatgatcaagttccggggccacttcctgatcgagggcgacctgaaccccgacaacagcgacgtggacaagctgttcatccagctggtgcagacctacaaccagctgttcgaggaaaaccccatcaacgccagcggcgtggacgccaaggccatcctgtctgccagactgagcaagagcagacggctggaaaatctgatcgcccagctgcccggcgagaagaagaatggcctgttcggcaacctgattgccctgagcctgggcctgacccccaacttcaagagcaacttcgacctggccgaggatgccaaactgcagctgagcaaggacacctacgacgacgacctggacaacctgctggcccagatcggcgaccagtacgccgacctgtttctggccgccaagaacctgtccgacgccatcctgctgagcgacatcctgagagtgaacaccgagatcaccaaggcccccctgagcgcctctatgatcaagagatacgacgagcaccaccaggacctgaccctgctgaaagctctcgtgcggcagcagctgcctgagaagtacaaagagattttcttcgaccagagcaagaacggctacgccggctacatcgatggcggagccagccaggaagagttctacaagttcatcaagcccatcctggaaaagatggacggcaccgaggaactgctcgtgaagctgaacagagaggacctgctgcggaagcagcggaccttcgacaacggcagcatcccccaccagatccacctgggagagctgcacgccattctgcggcggcaggaagatttttacccattcctgaaggacaaccgggaaaagatcgagaagatcctgaccttccgcatcccctactacgtgggccctctggccaggggaaacagcagattcgcctggatgaccagaaagagcgaggaaaccatcaccccctggaacttcgaggaagtggtggacaagggcgccagcgcccagagcttcatcgagcggatgaccaacttcgataagaacctgcccaacgagaaggtgctgcccaagcacagcctgctgtacgagtacttcaccgtgtacaacgagctgaccaaagtgaaatacgtgaccgagggaatgagaaagcccgccttcctgagcggcgagcagaaaaaagccatcgtggacctgctgttcaagaccaaccggaaagtgaccgtgaagcagctgaaagaggactacttcaagaaaatcgagtgcttcgactccgtggaaatctccggcgtggaagatcggttcaacgcctccctgggcacataccacgatctgctgaaaattatcaaggacaaggacttcctggacaatgaggaaaacgaggacattctggaagatatcgtgctgaccctgacactgtttgaggacagagagatgatcgaggaacggctgaaaacctatgcccacctgttcgacgacaaagtgatgaagcagctgaagcggcggagatacaccggctggggcaggctgagccggaagctgatcaacggcatccgggacaagcagtccggcaagacaatcctggatttcctgaagtccgacggcttcgccaacagaaacttcatgcagctgatccacgacgacagcctgacctttaaagaggacatccagaaagcccaggtgtccggccagggcgatagcctgcacgagcacattgccaatctggccggcagccccgccattaagaagggcatcctgcagacagtgaaggtggtggacgagctcgtgaaagtgatgggccggcacaagcccgagaacatcgtgatcgaaatggccagagagaaccagaccacccagaagggacagaagaacagccgcgagagaatgaagcggatcgaagagggcatcaaagagctgggcagccagatcctgaaagaacaccccgtggaaaacacccagctgcagaacgagaagctgtacctgtactacctgcagaatgggcgggatatgtacgtggaccaggaactggacatcaaccggctgtccgactacgatgtggacgctatcgtgcctcagagctttctgaaggacgactccatcgataacaaagtgctgactcggagcgacaagaaccggggcaagagcgacaacgtgccctccgaagaggtcgtgaagaagatgaagaactactggcgccagctgctgaatgccaagctgattacccagaggaagttcgacaatctgaccaaggccgagagaggcggcctgagcgaactggataaggccggcttcatcaagagacagctggtggaaacccggcagatcacaaagcacgtggcacagatcctggactcccggatgaacactaagtacgacgagaacgacaaactgatccgggaagtgaaagtgatcaccctgaagtccaagctggtgtccgatttccggaaggatttccagttttacaaagtgcgcgagatcaacaactaccaccacgcccacgacgcctacctgaacgccgtcgtgggaaccgccctgatcaaaaagtaccctaagctggaaagcgagttcgtgtacggcgactacaaggtgtacgacgtgcggaagatgatcgccaagagcgagcaggaaatcggcaaggctaccgccaagtacttcttctacagcaacatcatgaactttttcaagaccgagattaccctggccaacggcgagatccggaagcggcctctgatcgagacaaacggcgaaacaggcgagatcgtgtgggataagggccgggactttgccaccgtgcggaaagtgctgtctatgccccaagtgaatatcgtgaaaaagaccgaggtgcagacaggcggcttcagcaaagagtctatcctgcccaagaggaacagcgacaagctgatcgccagaaagaaggactgggaccctaagaagtacggcggcttcgacagccccaccgtggcctattctgtgctggtggtggccaaagtggaaaagggcaagtccaagaaactgaagagtgtgaaagagctgctggggatcaccatcatggaaagaagcagcttcgagaagaatcccatcgactttctggaagccaagggctacaaagaagtgaaaaaggacctgatcatcaagctgcctaagtactccctgttcgagctggaaaacggccggaagagaatgctggcctctgccggcgaactgcagaagggaaacgaactggccctgccctccaaatatgtgaacttcctgtacctggccagccactatgagaagctgaagggctcccccgaggataatgagcagaaacagctgtttgtggaacagcacaaacactacctggacgagatcatcgagcagatcagcgagttctccaagagagtgatcctggccgacgctaatctggacaaggtgctgagcgcctacaacaagcacagagacaagcctatcagagagcaggccgagaatatcatccacctgtttaccctgaccaatctgggagcccctgccgccttcaagtactttgacaccaccatcgaccggaagaggtacaccagcaccaaagaggtgctggacgccaccctgatccaccagagcatcaccggcctgtacgagacacggatcgacctgtctcagctgggaggcgacgcctatccctatgacgtgcccgattatgccagcctgggcagcggctcccccaagaaaaaacgcaaggtggaagatcctaagaaaaagcggaaagtggacggcggagggccgagctctggcgcacccccaccaagtggagggtctcctgccgggtccccaacatctactgaagaaggcaccagcgaatccgcaacgcccgagtcaggccctggtacccatgtgagcgagctgattaaggagaacatgcacatgaagctgtacatggagggcaccgtggacaaccatcacttcaagtgcacatccgagggcgaaggcaagccctacgagggcacccagaccatgagaatcaaggtggtcgagggcggccctctccccttcgccttcgacatcctggctactagcttcctctacggcagcaagaccttcatcaaccacacccagggcatccccgacttcttcaagcagtccttccctgagggcttcacatgggagagagtcaccacatacgaagacgggggcgtgctgaccgctacccaggacaccagcctccaggacggctgcctcatctacaacgtcaagatcagaggggtgaacttcacatccaacggccctgtgatgcagaagaaaacactcggctgggaggccttcaccgaaacgctgtaccccgctgacggcggcctggaaggcagaaacgacatggccctgaagctcgtgggcgggagccatctgatcgcaaacatcaagaccacatatagatccaagaaacccgctaagaacctcaagatgcctggcgtctactatgtggactacagactggaaagaatcaaggaggccaacaacgagacctacgtcgagcagcacgaggtggcagtggccagatactgcgacctccctagcaaactggggcacaagcttaatggatctgcccctgggaccagcactgaaccatctgagcggacactcgagctgttccgcgacgtggccattgtgttctctcaagaggaatggcagtggctggcccctgctcagagagatctctaccgcgacgttatgctggagacatactccaatctcgtgtccctcggcctggccgtgtccaaacctgatgtgatcagcttcctcgagcagggaaaagaaccttggatgagcggcagcgagacccccggtaccagcgagggcggccctagcagcggcgcccctccccctagcggcggcagccctgccggatcccctacaagcaccgaagaaggcacaagcgagtccgctacccctgagtccggccctggcacctccacagagcctagcgagggatccgctcctggatcccctgccggaagccctacctccaccgaggagggcacaagcaccgagccttccgagggcagcgcccccggaacaagcaccgaacctagcgagagcgccacccccgagagcatgttcgaaaccgtgcctgtgtggaggagacagccagtccgggtgctgtccctttttgaagacatcaagaaagagctgacgagtttgggctttttggaaagtggttctgacccgggacaactgaagcatgtggttgatgtcacagacacagtgaggaaggatgtggaggagtggggacccttcgatcttgtgtacggcgccacacctcccctgggccacacctgtgaccgtcctcccagctggtacctgttccagttccaccggctcctgcagtacgcacggcccaagccaggcagccccaggcccttcttctggatgttcgtggacaatctggtgctgaacaaggaagacctggacgtcgcatctcgcttcctggagatggagccagtcaccatcccagatgtccacggcggatccttgcagaatgctgtccgcgtgtggagcaacatcccagccataaggagcagcaggcactgggctctggtttcggaagaagaattgtccctgctggcccagaacaagcagagctcgaagctcgcggccaagtggcccaccaagctggtgaagaactgctttctccccctaagagaatatttcaagtatttttcaacagaactcacttcctctttatctagcggcaatagtaacgctaacagccgcgggccgagcttcagcagcggcctggtgccgttaagcttgcgcggcagccatatgaaccatgaccaggaatttgaccccccaaaggtttacccacctgtgccagctgagaagaggaagcccatccgcgtgctgtctctctttgatgggattgctacagggctcctggtgctgaaggacctgggcatccaagtggaccgctacattgcctccgaggtgtgtgaggactccatcacggtgggcatggtgcggcaccagggaaagatcatgtacgtcggggacgtccgcagcgtcacacagaagcatatccaggagtggggcccattcgacctggtgattggaggcagtccctgcaatgacctctccattgtcaaccctgcccgcaagggactttatgagggtactggccgcctcttctttgagttctaccgcctcctgcatgatgcgcggcccaaggagggagatgatcgccccttcttctggctctttgagaatgtggtggccatgggcgttagtgacaagagggacatctcgcgatttcttgagtctaaccccgtgatgattgacgccaaagaagtgtctgctgcacacagggcccgttacttctggggtaaccttcctggcatgaacaggcctttggcatccactgtgaatgataagctggagctgcaagagtgtctggagcacggcagaatagccaagttcagcaaagtgaggaccattaccaccaggtcaaactctataaagcagggcaaagaccagcatttccccgtcttcatgaacgagaaggaggacatcctgtggtgcactgaaatggaaagggtgtttggcttccccgtccactacacagacgtctccaacatgagccgcttggcgaggcagagactgctgggccgatcgtggagcgtgccggtcatccgccacctcttcgctccgctgaaggaatattttgcttgtgtgctcgagtaatga

SEQ ID NO: 222 - DNA, 7191 bp, synthetic construct
  misc_feature 1..7191: note = V37 CDS
  source 1..7191: mol_type = other DNA
atgccaaaaaagaagagaaaggtaatggacaagaagtacagcatcggcctggccatcggcaccaactctgtgggctgggccgtgatcaccgacgagtacaaggtgcccagcaagaaattcaaggtgctgggcaacaccgaccggcacagcatcaagaagaacctgatcggcgccctgctgttcgacagcggagaaacagccgaggccacccggctgaagagaaccgccagaagaagatacaccagacggaagaaccggatctgctatctgcaagagatcttcagcaacgagatggccaaggtggacgacagcttcttccacagactggaagagtccttcctggtggaagaggataagaagcacgagcggcaccccatcttcggcaacatcgtggacgaggtggcctaccacgagaagtaccccaccatctaccacctgagaaagaaactggtggacagcaccgacaaggccgacctgcggctgatctatctggccctggcccacatgatcaagttccggggccacttcctgatcgagggcgacctgaaccccgacaacagcgacgtggacaagctgttcatccagctggtgcagacctacaaccagctgttcgaggaaaaccccatcaacgccagcggcgtggacgccaaggccatcctgtctgccagactgagcaagagcagacggctggaaaatctgatcgcccagctgcccggcgagaagaagaatggcctgttcggcaacctgattgccctgagcctgggcctgacccccaacttcaagagcaacttcgacctggccgaggatgccaaactgcagctgagcaaggacacctacgacgacgacctggacaacctgctggcccagatcggcgaccagtacgccgacctgtttctggccgccaagaacctgtccgacgccatcctgctgagcgacatcctgagagtgaacaccgagatcaccaaggcccccctgagcgcctctatgatcaagagatacgacgagcaccaccaggacctgaccctgctgaaagctctcgtgcggcagcagctgcctgagaagtacaaagagattttcttcgaccagagcaagaacggctacgccggctacatcgatggcggagccagccaggaagagttctacaagttcatcaagcccatcctggaaaagatggacggcaccgaggaactgctcgtgaagctgaacagagaggacctgctgcggaagcagcggaccttcgacaacggcagcatcccccaccagatccacctgggagagctgcacgccattctgcggcggcaggaagatttttacccattcctgaaggacaaccgggaaaagatcgagaagatcctgaccttccgcatcccctactacgtgggccctctggccaggggaaacagcagattcgcctggatgaccagaaagagcgaggaaaccatcaccccctggaacttcgaggaagtggtggacaagggcgccagcgcccagagcttcatcgagcggatgaccaacttcgataagaacctgcccaacgagaaggtgctgcccaagcacagcctgctgtacgagtacttcaccgtgtacaacgagctgaccaaagtgaaatacgtgaccgagggaatgagaaagcccgccttcctgagcggcgagcagaaaaaagccatcgtggacctgctgttcaagaccaaccggaaagtgaccgtgaagcagctgaaagaggactacttcaagaaaatcgagtgcttcgactccgtggaaatctccggcgtggaagatcggttcaacgcctccctgggcacataccacgatctgctgaaaattatcaaggacaaggacttcctggacaatgaggaaaacgaggacattctggaagatatcgtgctgaccctgacactgtttgaggacagagagatgatcgaggaacggctgaaaacctatgcccacctgttcgacgacaaagtgatgaagcagctgaagcggcggagatacaccggctggggcaggctgagccggaagctgatcaacggcatccgggacaagcagtccggcaagacaatcctggatttcctgaagtccgacggcttcgccaacagaaacttcatgcagctgatccacgacgacagcctgacctttaaagaggacatccagaaagcccaggtgtccggccagggcgatagcctgcacgagcacattgccaatctggccggcagccccgccattaagaagggcatcctgcagacagtgaaggtggtggacgagctcgtgaaagtgatgggccggcacaagcccgagaacatcgtgatcgaaatggccagagagaaccagaccacccagaagggacagaagaacagccgcgagagaatgaagcggatcgaagagggcatcaaagagctgggcagccagatcctgaaagaacaccccgtggaaaacacccagctgcagaacgagaagctgtacctgtactacctgcagaatgggcgggatatgtacgtggaccaggaactggacatcaaccggctgtccgactacgatgtggacgctatcgtgcctcagagctttctgaaggacgactccatcgataacaaagtgctgactcggagcgacaagaaccggggcaagagcgacaacgtgccctccgaagaggtcgtgaagaagatgaagaactactggcgccagctgctgaatgccaagctgattacccagaggaagttcgacaatctgaccaaggccgagagaggcggcctgagcgaactggataaggccggcttcatcaagagacagctggtggaaacccggcagatcacaaagcacgtggcacagatcctggactcccggatgaacactaagtacgacgagaacgacaaactgatccgggaagtgaaagtgatcaccctgaagtccaagctggtgtccgatttccggaaggatttccagttttacaaagtgcgcgagatcaacaactaccaccacgcccacgacgcctacctgaacgccgtcgtgggaaccgccctgatcaaaaagtaccctaagctggaaagcgagttcgtgtacggcgactacaaggtgtacgacgtgcggaagatgatcgccaagagcgagcaggaaatcggcaaggctaccgccaagtacttcttctacagcaacatcatgaactttttcaagaccgagattaccctggccaacggcgagatccggaagcggcctctgatcgagacaaacggcgaaacaggcgagatcgtgtgggataagggccgggactttgccaccgtgcggaaagtgctgtctatgccccaagtgaatatcgtgaaaaagaccgaggtgcagacaggcggcttcagcaaagagtctatcctgcccaagaggaacagcgacaagctgatcgccagaaagaaggactgggaccctaagaagtacggcggcttcgacagccccaccgtggcctattctgtgctggtggtggccaaagtggaaaagggcaagtccaagaaactgaagagtgtgaaagagctgctggggatcaccatcatggaaagaagcagcttcgagaagaatcccatcgactttctggaagccaagggctacaaagaagtgaaaaaggacctgatcatcaagctgcctaagtactccctgttcgagctggaaaacggccggaagagaatgctggcctctgccggcgaactgcagaagggaaacgaactggccctgccctccaaatatgtgaacttcctgtacctggccagccactatgagaagctgaagggctcccccgaggataatgagcagaaacagctgtttgtggaacagcacaaacactacctggacgagatcatcgagcagatcagcgagttctccaagagagtgatcctggccgacgctaatctggacaaggtgctgagcgcctacaacaagcacagagacaagcctatcagagagcaggccgagaatatcatccacctgtttaccctgaccaatctgggagcccctgccgccttcaagtactttgacaccaccatcgaccggaagaggtacaccagcaccaaagaggtgctggacgccaccctgatccaccagagcatcaccggcctgtacgagacacggatcgacctgtctcagctgggaggcgacgcctatccctatgacgtgcccgattatgccagcctgggcagcggctcccccaagaaaaaacgcaaggtggaagatcctaagaaaaagcggaaagtggacggcggagggccgagctctggcgcacccccaccaagtggagggtctcctgccgggtccccaacatctactgaagaaggcaccagcgaatccgcaacgcccgagtcaggccctggtacccatgtgagcgagctgattaaggagaacatgcacatgaagctgtacatggagggcaccgtggacaaccatcacttcaagtgcacatccgagggcgaaggcaagccctacgagggcacccagaccatgagaatcaaggtggtcgagggcggccctctccccttcgccttcgacatcctggctactagcttcctctacggcagcaagaccttcatcaaccacacccagggcatccccgacttcttcaagcagtccttccctgagggcttcacatgggagagagtcaccacatacgaagacgggggcgtgctgaccgctacccaggacaccagcctccaggacggctgcctcatctacaacgtcaagatcagaggggtgaacttcacatccaacggccctgtgatgcagaagaaaacactcggctgggaggccttcaccgaaacgctgtaccccgctgacggcggcctggaaggcagaaacgacatggccctgaagctcgtgggcgggagccatctgatcgcaaacatcaagaccacatatagatccaagaaacccgctaagaacctcaagatgcctggcgtctactatgtggactacagactggaaagaatcaaggaggccaacaacgagacctacgtcgagcagcacgaggtggcagtggccagatactgcgacctccctagcaaactggggcacaagcttaatggatctgcccctgggaccagcactgaaccatctgagcggacactcatggcctttgaggacgtcgccgtgtatttttcccaagaagaatggggactgctcgacactgcccagagagccctgtatcgcagagtcatgctggacaacttcgccctggtggcctccctgggcctgtctacaagcagacccagagtggtcattcagctggaaagaggcgaggaaccctgggtcagcggcagcgagacccccggtaccagcgagggcggccctagcagcggcgcccctccccctagcggcggcagccctgccggatcccctacaagcaccgaagaaggcacaagcgagtccgctacccctgagtccggccctggcacctccacagagcctagcgagggatccgctcctggatcccctgccggaagccctacctccaccgaggagggcacaagcaccgagccttccgagggcagcgcccccggaacaagcaccgaacctagcgagagcgccacccccgagagcatgttcgaaaccgtgcctgtgtggaggagacagccagtccgggtgctgtccctttttgaagacatcaagaaagagctgacgagtttgggctttttggaaagtggttctgacccgggacaactgaagcatgtggttgatgtcacagacacagtgaggaaggatgtggaggagtggggacccttcgatcttgtgtacggcgccacacctcccctgggccacacctgtgaccgtcctcccagctggtacctgttccagttccaccggctcctgcagtacgcacggcccaagccaggcagccccaggcccttcttctggatgttcgtggacaatctggtgctgaacaaggaagacctggacgtcgcatctcgcttcctggagatggagccagtcaccatcccagatgtccacggcggatccttgcagaatgctgtccgcgtgtggagcaacatcccagccataaggagcagcaggcactgggctctggtttcggaagaagaattgtccctgctggcccagaacaagcagagctcgaagctcgcggccaagtggcccaccaagctggtgaagaactgctttctccccctaagagaatatttcaagtatttttcaacagaactcacttcctctttatctagcggcaatagtaacgctaacagccgcgggccgagcttcagcagcggcctggtgccgttaagcttgcgcggcagccatatgaaccatgaccaggaatttgaccccccaaaggtttacccacctgtgccagctgagaagaggaagcccatccgcgtgctgtctctctttgatgggattgctacagggctcctggtgctgaaggacctgggcatccaagtggaccgctacattgcctccgaggtgtgtgaggactccatcacggtgggcatggtgcggcaccagggaaagatcatgtacgtcggggacgtccgcagcgtcacacagaagcatatccaggagtggggcccattcgacctggtgattggaggcagtccctgcaatgacctctccattgtcaaccctgcccgcaagggactttatgagggtactggccgcctcttctttgagttctaccgcctcctgcatgatgcgcggcccaaggagggagatgatcgccccttcttctggctctttgagaatgtggtggccatgggcgttagtgacaagagggacatctcgcgatttcttgagtctaaccccgtgatgattgacgccaaagaagtgtctgctgcacacagggcccgttacttctggggtaaccttcctggcatgaacaggcctttggcatccactgtgaatgataagctggagctgcaagagtgtctggagcacggcagaatagccaagttcagcaaagtgaggaccattaccaccaggtcaaactctataaagcagggcaaagaccagcatttccccgtcttcatgaacgagaaggaggacatcctgtggtgcactgaaatggaaagggtgtttggcttccccgtccactacacagacgtctccaacatgagccgcttggcgaggcagagactgctgggccgatcgtggagcgtgccggtcatccgccacctcttcgctccgctgaaggaatattttgcttgtgtgctcgagtaatga

SEQ ID NO: 223 - DNA, 7173 bp, synthetic construct
  misc_feature 1..7173: note = V38 CDS
  source 1..7173: mol_type = other DNA
atgaacaattcccagggaagagtgaccttcgaggatgtcactgtgaacttcacccagggggagtggcagcggctgaatcccgaacagagaaacttgtacagggatgtgatgctggagaattacagcaaccttgtctctgtgggacaaggggaaaccaccaaacccgatgtgatcttgaggttggaacaaggaaaggagccatggttggaggaagaggaagtgctgggaagtggccgtgcagaaaaaaatggggacattggagggcagatttggaagccaaaggatgtgaaagagagtctcagcggcagcgagacccccggtaccagcgagagcgccacccccgagagccatgtgagcgagctgattaaggagaacatgcacatgaagctgtacatggagggcaccgtggacaaccatcacttcaagtgcacatccgagggcgaaggcaagccctacgagggcacccagaccatgagaatcaaggtggtcgagggcggccctctccccttcgccttcgacatcctggctactagcttcctctacggcagcaagaccttcatcaaccacacccagggcatccccgacttcttcaagcagtccttccctgagggcttcacatgggagagagtcaccacatacgaagacgggggcgtgctgaccgctacccaggacaccagcctccaggacggctgcctcatctacaacgtcaagatcagaggggtgaacttcacatccaacggccctgtgatgcagaagaaaacactcggctgggaggccttcaccgaaacgctgtaccccgctgacggcggcctggaaggcagaaacgacatggccctgaagctcgtgggcgggagccatctgatcgcaaacatcaagaccacatatagatccaagaaacccgctaagaacctcaagatgcctggcgtctactatgtggactacagactggaaagaatcaaggaggccaacaacgagacctacgtcgagcagcacgaggtggcagtggccagatactgcgacctccctagcaaactggggcacaagcttaatagcggcagcgagacccccggtaccagcgagagcgccacccccgagagcatgaaccatgaccaggaatttgaccccccaaaggtttacccacctgtgccagctgagaagaggaagcccatccgcgtgctgtctctctttgatgggattgctacagggctcctggtgctgaaggacctgggcatccaagtggaccgctacattgcctccgaggtgtgtgaggactccatcacggtgggcatggtgcggcaccagggaaagatcatgtacgtcggggacgtccgcagcgtcacacagaagcatatccaggagtggggcccattcgacctggtgattggaggcagtccctgcaatgacctctccattgtcaaccctgcccgcaagggactttatgagggtactggccgcctcttctttgagttctaccgcctcctgcatgatgcgcggcccaaggagggagatgatcgccccttcttctggctctttgagaatgtggtggccatgggcgttagtgacaagagggacatctcgcgatttcttgagtctaaccccgtgatgattgacgccaaagaagtgtctgctgcacacagggcccgttacttctggggtaaccttcctggcatgaacaggcctttggcatccactgtgaatgataagctggagctgcaagagtgtctggagcacggcagaatagccaagttcagcaaagtgaggaccattaccaccaggtcaaactctataaagcagggcaaagaccagcatttccccgtcttcatgaacgagaaggaggacatcctgtggtgcactgaaatggaaagggtgtttggcttccccgtccactacacagacgtctccaacatgagccgcttggcgaggcagagactgctgggccgatcgtggagcgtgccggtcatccgccacctcttcgctccgctgaaggaatattttgcttgtgtgtctagcggcaatagtaacgctaacagccgcgggccgagcttcagcagcggcctggtgccgttaagcttgcgcggcagccatatgttcgaaaccgtgcctgtgtggaggagacagccagtccgggtgctgtccctttttgaagacatcaagaaagagctgacgagtttgggctttttggaaagtggttctgacccgggacaactgaagcatgtggttgatgtcacagacacagtgaggaaggatgtggaggagtggggacccttcgatcttgtgtacggcgccacacctcccctgggccacacctgtgaccgtcctcccagctggtacctgttccagttccaccggctcctgcagtacgcacggcccaagccaggcagccccaggcccttcttctggatgttcgtggacaatctggtgctgaacaaggaagacctggacgtcgcatctcgcttcctggagatggagccagtcaccatcccagatgtccacggcggatccttgcagaatgctgtccgcgtgtggagcaacatcccagccataaggagcagcaggcactgggctctggtttcggaagaagaattgtccctgctggcccagaacaagcagagctcgaagctcgcggccaagtggcccaccaagctggtgaagaactgctttctccccctaagagaatatttcaagtatttttcaggagggccgagctctggcgcacccccaccaagtggagggtctcctgccgggtccccaacatctactgaagaaggcaccagcgaatccgcaacgcccgagtcaggccctggtacctccacagaaccatctgaaggtagtgcgcctggttccccagctggaagccctacttccaccgaagaaggcacgtcaaccgaaccaagtgaaggatctgcccctgggaccagcactgaaccatctgagccaaaaaagaagagaaaggtaatggacaagaagtacagcatcggcctggccatcggcaccaactctgtgggctgggccgtgatcaccgacgagtacaaggtgcccagcaagaaattcaaggtgctgggcaacaccgaccggcacagcatcaagaagaacctgatcggcgccctgctgttcgacagcggagaaacagccgaggccacccggctgaagagaaccgccagaagaagatacaccagacggaagaaccggatctgctatctgcaagagatcttcagcaacgagatggccaaggtggacgacagcttcttccacagactggaagagtccttcctggtggaagaggataagaagcacgagcggcaccccatcttcggcaacatcgtggacgaggtggcctaccacgagaagtaccccaccatctaccacctgagaaagaaactggtggacagcaccgacaaggccgacctgcggctgatctatctggccctggcccacatgatcaagttccggggccacttcctgatcgagggcgacctgaaccccgacaacagcgacgtggacaagctgttcatccagctggtgcagacctacaaccagctgttcgaggaaaaccccatcaacgccagcggcgtggacgccaaggccatcctgtctgccagactgagcaagagcagacggctggaaaatctgatcgcccagctgcccggcgagaagaagaatggcctgttcggcaacctgattgccctgagcctgggcctgacccccaacttcaagagcaacttcgacctggccgaggatgccaaactgcagctgagcaaggacacctacgacgacgacctggacaacctgctggcccagatcggcgaccagtacgccgacctgtttctggccgccaagaacctgtccgacgccatcctgctgagcgacatcctgagagtgaacaccgagatcaccaaggcccccctgagcgcctctatgatcaagagatacgacgagcaccaccaggacctgaccctgctgaaagctctcgtgcggcagcagctgcctgagaagtacaaagagattttcttcgaccagagcaagaacggctacgccggctacatcgatggcggagccagccaggaagagttctacaagttcatcaagcccatcctggaaaagatggacggcaccgaggaactgctcgtgaagctgaacagagaggacctgctgcggaagcagcggaccttcgacaacggcagcatcccccaccagatccacctgggagagctgcacgccattctgcggcggcaggaagatttttacccattcctgaaggacaaccgggaaaagatcgagaagatcctgaccttccgcatcccctactacgtgggccctctggccaggggaaacagcagattcgcctggatgaccagaaagagcgaggaaaccatcaccccctggaacttcgaggaagtggtggacaagggcgccagcgcccagagcttcatcgagcggatgaccaacttcgataagaacctgcccaacgagaaggtgctgcccaagcacagcctgctgtacgagtacttcaccgtgtacaacgagctgaccaaagtgaaatacgtgaccgagggaatgagaaagcccgccttcctgagcggcgagcagaaaaaagccatcgtggacctgctgttcaagaccaaccggaaagtgaccgtgaagcagctgaaagaggactacttcaagaaaatcgagtgcttcgactccgtggaaatctccggcgtggaagatcggttcaacgcctccctgggcacataccacgatctgctgaaaattatcaaggacaaggacttcctggacaatgaggaaaacgaggacattctggaagatatcgtgctgaccctgacactgtttgaggacagagagatgatcgaggaacggctgaaaacctatgcccacctgttcgacgacaaagtgatgaagcagctgaagcggcggagatacaccggctggggcaggctgagccggaagctgatcaacggcatccgggacaagcagtccggcaagacaatcctggatttcctgaagtccgacggcttcgccaacagaaacttcatgcagctgatccacgacgacagcctgacctttaaagaggacatccagaaagcccaggtgtccggccagggcgatagcctgcacgagcacattgccaatctggccggcagccccgccattaagaagggcatcctgcagacagtgaaggtggtggacgagctcgtgaaagtgatgggccggcacaagcccgagaacatcgtgatcgaaatggccagagagaaccagaccacccagaagggacagaagaacagccgcgagagaatgaagcggatcgaagagggcatcaaagagctgggcagccagatcctgaaagaacaccccgtggaaaacacccagctgcagaacgagaagctgtacctgtactacctgcagaatgggcgggatatgtacgtggaccaggaactggacatcaaccggctgtccgactacgatgtggacgctatcgtgcctcagagctttctgaaggacgactccatcgataacaaagtgctgactcggagcgacaagaaccggggcaagagcgacaacgtgccctccgaagaggtcgtgaagaagatgaagaactactggcgccagctgctgaatgccaagctgattacccagaggaagttcgacaatctgaccaaggccgagagaggcggcctgagcgaactggataaggccggcttcatcaagagacagctggtggaaacccggcagatcacaaagcacgtggcacagatcctggactcccggatgaacactaagtacgacgagaacgacaaactgatccgggaagtgaaagtgatcaccctgaagtccaagctggtgtccgatttccggaaggatttccagttttacaaagtgcgcgagatcaacaactaccaccacgcccacgacgcctacctgaacgccgtcgtgggaaccgccctgatcaaaaagtaccctaagctggaaagcgagttcgtgtacggcgactacaaggtgtacgacgtgcggaagatgatcgccaagagcgagcaggaaatcggcaaggctaccgccaagtacttcttctacagcaacatcatgaactttttcaagaccgagattaccctggccaacggcgagatccggaagcggcctctgatcgagacaaacggcgaaacaggcgagatcgtgtgggataagggccgggactttgccaccgtgcggaaagtgctgtctatgccccaagtgaatatcgtgaaaaagaccgaggtgcagacaggcggcttcagcaaagagtctatcctgcccaagaggaacagcgacaagctgatcgccagaaagaaggactgggaccctaagaagtacggcggcttcgacagccccaccgtggcctattctgtgctggtggtggccaaagtggaaaagggcaagtccaagaaactgaagagtgtgaaagagctgctggggatcaccatcatggaaagaagcagcttcgagaagaatcccatcgactttctggaagccaagggctacaaagaagtgaaaaaggacctgatcatcaagctgcctaagtactccctgttcgagctggaaaacggccggaagagaatgctggcctctgccggcgaactgcagaagggaaacgaactggccctgccctccaaatatgtgaacttcctgtacctggccagccactatgagaagctgaagggctcccccgaggataatgagcagaaacagctgtttgtggaacagcacaaacactacctggacgagatcatcgagcagatcagcgagttctccaagagagtgatcctggccgacgctaatctggacaaggtgctgagcgcctacaacaagcacagagacaagcctatcagagagcaggccgagaatatcatccacctgtttaccctgaccaatctgggagcccctgccgccttcaagtactttgacaccaccatcgaccggaagaggtacaccagcaccaaagaggtgctggacgccaccctgatccaccagagcatcaccggcctgtacgagacacggatcgacctgtctcagctgggaggcgacgcctatccctatgacgtgcccgattatgccagcctgggcagcggctcccccaagaaaaaacgcaaggtggaagatcctaagaaaaagcggaaagtggacggcctcgagtaatga

SEQ ID NO: 224 - DNA, 6577 bp, synthetic construct
  misc_feature 1..6577: note = V39 CDS
  source 1..6577: mol_type = other DNA
atggtgcctgccgccaagagagtgaagctggacggcagcaaccacgaccaagagttcgaccctcctaaggtgtaccctcctgtgccagccgagaagcggaagcctatcagagtgctgagcctgttcgacggaatcgccacaggactgctggtgctgaaggatctgggaatccaggtggaccggtatatcgccagcgaagtgtgcgaggacagcatcacagttggcatggttcgacaccagggcaagattatgtacgtgggcgacgtgcggagcgtgacccagaaacacattcaagagtggggccccttcgacctggttatcggcggcagcccttgcaacgatctgagcatcgtgaaccccgccagaaagggcctgtatgaaggcaccggcagactgttcttcgagttctacagactgctgcacgacgccagacctaaagagggcgacgacagaccattcttctggctgttcgagaacgtggtggctatgggcgtgtccgacaagcgggacatcagccggtttctggaaagcaaccccgtgatgatcgacgccaaagaggtgtccgctgctcaccgggccagatacttttggggcaatctgcccggcatgaacagacctctggccagcaccgtgaacgacaagctggaactgcaagagtgcctggaacacggccggatcgccaagtttagcaaagtgcggaccatcaccaccaggtccaacagcatcaagcagggcaaagaccagcacttccccgtgttcatgaatgagaaagaggacatcctgtggtgcaccgagatggaaagagtgttcggcttccctgtgcactacaccgacgtgtccaacatgagcagactggccagacagaggctgctgggcagatcttggagcgtgccagtgatcagacacctgttcgcccctctgaaagaatacttcgcctgcgtgtccagcggcaacagcaacgccaatagcagaggccctagcttcagctctggactggtgcctttgagcctgagaggcagccacatgttcgagacagtgcctgtgtggcggagacagcccgttagagtgctgtccctgtttgaggacatcaagaaagagctgaccagcctgggcttcctggaaagcggatctgatcctggccagctgaagcacgtggtggacgtgaccgataccgtgcggaaggatgtggaagaatggggcccttttgatctggtgtacggcgccacacctcctctgggccacacatgtgatagacctccaagctggtatctgttccagttccaccggctgctgcagtacgctagacccaagcctggaagccccaggcctttcttttggatgttcgtggacaacctggtcctgaacaaagaggacctggacgtcgccagccggttcctcgaaatggaacctgtgacaatccccgacgtgcacggcggatctctgcagaatgctgtcagagtgtggtctaacatccccgccatcagaagcagcagacactgggcccttgtgtccgaggaagaactgtctctgctggcccagaacaagcagagcagcaagctggccgccaagtggcctacaaagctggtcaagaactgcttcctgcctctgcgcgagtacttcaagtatttcagcggcggacctagctctggcgcccctccacctagcggaggatctccagcaggatctcctaccagcaccgaggaaggcacaagcgagtctgccacacctgagtctggccctggcacatctacagagcctagcgagggatctgcccctggatctcctgctggcagccctacatctaccgaagagggaaccagcacagagccttccgaaggttctgctcctggcacaagcaccgagccaagcgagatgaacaacagccagggcagagtgaccttcgaggatgtgaccgtgaacttcacccaaggcgagtggcagagactgaaccccgagcagagaaacctgtaccgggacgtgatgctggaaaactacagcaacctggtgtccgtcggccagggcgagacaacaaagcctgacgtgatcctgcggctggaacagggaaaagagccttggctggaagaggaagaggtgctcggatctggacgggccgagaagaacggcgatattggcggacagatctggaagcctaaggacgtgaaagagagcctgagcggctctgaaacacctggaacaagcgaaggcggaccaggcacctctaccgaaccatctgagggaagcgctccaggttctcctgccggctctccaacaagcacagaagagggcacctccactgagccctctgaaggcagtgctcctggaacttccaccgaaccttccgagccaaagaagaaacgcaaggtgggctccgacaagaagtacagcatcggcctggccatcggcaccaactctgtgggctgggccgtgatcaccgacgagtacaaggtgcccagcaagaaattcaaggtgctgggcaacaccgaccggcacagcatcaagaagaacctgatcggcgccctgctgttcgacagcggagaaacagccgaggccacccggctgaagagaaccgccagaagaagatacaccagacggaagaaccggatctgctatctgcaagagatcttcagcaacgagatggccaaggtggacgacagcttcttccacagactggaagagtccttcctggtggaagaggataagaagcacgagcggcaccccatcttcggcaacatcgtggacgaggtggcctaccacgagaagtaccccaccatctaccacctgagaaagaaactggtggacagcaccgacaaggccgacctgcggctgatctatctggccctggcccacatgatcaagttccggggccacttcctgatcgagggcgacctgaaccccgacaacagcgacgtggacaagctgttcatccagctggtgcagacctacaaccagctgttcgaggaaaaccccatcaacgccagcggcgtggacgccaaggccatcctgtctgccagactgagcaagagcagacggctggaaaatctgatcgcccagctgcccggcgagaagaagaatggcctgttcggcaacctgattgccctgagcctgggcctgacccccaacttcaagagcaacttcgacctggccgaggatgccaaactgcagctgagcaaggacacctacgacgacgacctggacaacctgctggcccagatcggcgaccagtacgccgacctgtttctggccgccaagaacctgtccgacgccatcctgctgagcgacatcctgagagtgaacaccgagatcaccaaggcccccctgagcgcctctatgatcaagagatacgacgagcaccaccaggacctgaccctgctgaaagctctcgtgcggcagcagctgcctgagaagtacaaagagattttcttcgaccagagcaagaacggctacgccggctacatcgatggcggagccagccaggaagagttctacaagttcatcaagcccatcctggaaaagatggacggcaccgaggaactgctcgtgaagctgaacagagaggacctgctgcggaagcagcggaccttcgacaacggcagcatcccccaccagatccacctgggagagctgcacgccattctgcggcggcaggaagatttttacccattcctgaaggacaaccgggaaaagatcgagaagatcctgaccttccgcatcccctactacgtgggccctctggccaggggaaacagcagattcgcctggatgaccagaaagagcgaggaaaccatcaccccctggaacttcgaggaagtggtggacaagggcgccagcgcccagagcttcatcgagcggatgaccaacttcgataagaacctgcccaacgagaaggtgctgcccaagcacagcctgctgtacgagtacttcaccgtgtacaacgagctgaccaaagtgaaatacgtgaccgagggaatgagaaagcccgccttcctgagcggcgagcagaaaaaagccatcgtggacctgctgttcaagaccaaccggaaagtgaccgtgaagcagctgaaagaggactacttcaagaaaatcgagtgcttcgactccgtggaaatctccggcgtggaagatcggttcaacgcctccctgggcacataccacgatctgctgaaaattatcaaggacaaggacttcctggacaatgaggaaaacgaggacattctggaagatatcgtgctgaccctgacactgtttgaggacagagagatgatcgaggaacggctgaaaacctatgcccacctgttcgacgacaaagtgatgaagcagctgaagcggcggagatacaccggctggggcaggctgagccggaagctgatcaacggcatccgggacaagcagtccggcaagacaatcctggatttcctgaagtccgacggcttcgccaacagaaacttcatgcagctgatccacgacgacagcctgacctttaaagaggacatccagaaagcccaggtgtccggccagggcgatagcctgcacgagcacattgccaatctggccggcagccccgccattaagaagggcatcctgcagacagtgaaggtggtggacgagctcgtgaaagtgatgggccggcacaagcccgagaacatcgtgatcgaaatggccagagagaaccagaccacccagaagggacagaagaacagccgcgagagaatgaagcggatcgaagagggcatcaaagagctgggcagccagatcctgaaagaacaccccgtggaaaacacccagctgcagaacgagaagctgtacctgtactacctgcagaatgggcgggatatgtacgtggaccaggaactggacatcaaccggctgtccgactacgatgtggacgctatcgtgcctcagagctttctgaaggacgactccatcgataacaaagtgctgactcggagcgacaagaaccggggcaagagcgacaacgtgccctccgaagaggtcgtgaagaagatgaagaactactggcgccagctgctgaatgccaagctgattacccagaggaagttcgacaatctgaccaaggccgagagaggcggcctgagcgaactggataaggccggcttcatcaagagacagctggtggaaacccggcagatcacaaagcacgtggcacagatcctggactcccggatgaacactaagtacgacgagaacgacaaactgatccgggaagtgaaagtgatcaccctgaagtccaagctggtgtccgatttccggaaggatttccagttttacaaagtgcgcgagatcaacaactaccaccacgcccacgacgcctacctgaacgccgtcgtgggaaccgccctgatcaaaaagtaccctaagctggaaagcgagttcgtgtacggcgactacaaggtgtacgacgtgcggaagatgatcgccaagagcgagcaggaaatcggcaaggctaccgccaagtacttcttctacagcaacatcatgaactttttcaagaccgagattaccctggccaacggcgagatccggaagcggcctctgatcgagacaaacggcgaaacaggcgagatcgtgtgggataagggccgggactttgccaccgtgcggaaagtgctgtctatgccccaagtgaatatcgtgaaaaagaccgaggtgcagacaggcggcttcagcaaagagtctatcctgcccaagaggaacagcgacaagctgatcgccagaaagaaggactgggaccctaagaagtacggcggcttcgacagccccaccgtggcctattctgtgctggtggtggccaaagtggaaaagggcaagtccaagaaactgaagagtgtgaaagagctgctggggatcaccatcatggaaagaagcagcttcgagaagaatcccatcgactttctggaagccaagggctacaaagaagtgaaaaaggacctgatcatcaagctgcctaagtactccctgttcgagctggaaaacggccggaagagaatgctggcctctgccggcgaactgcagaagggaaacgaactggccctgccctccaaatatgtgaacttcctgtacctggccagccactatgagaagctgaagggctcccccgaggataatgagcagaaacagctgtttgtggaacagcacaaacactacctggacgagatcatcgagcagatcagcgagttctccaagagagtgatcctggccgacgctaatctggacaaggtgctgagcgcctacaacaagcacagagacaagcctatcagagagcaggccgagaatatcatccacctgtttaccctgaccaatctgggagcccctgccgccttcaagtactttgacaccaccatcgaccggaagaggtacaccagcaccaaagaggtgctggacgccaccctgatccaccagagcatcaccggcctgtacgagacacggatcgacctgtctcagctgggaggcgacgcctatccctatgacgtgcccgattatgccagcctgggcagcggctcccccaagaaaaaacgcaaggtggaagatcctaagaaaaagcggaaagtgtgataatagg

SEQ ID NO: 225 - DNA, 6471 bp, synthetic construct
  misc_feature 1..6471: note = V40 CDS
  source 1..6471: mol_type = other DNA
atgcctgctgctaagagagtgaaactggatggatccaaccatgaccaggaatttgaccccccaaaggtttacccacctgtgccagctgagaagaggaagcccatccgcgtgctgtctctctttgatgggattgctacagggctcctggtgctgaaggacctgggcatccaagtggaccgctacattgcctccgaggtgtgtgaggactccatcacggtgggcatggtgcggcaccagggaaagatcatgtacgtcggggacgtccgcagcgtcacacagaagcatatccaggagtggggcccattcgacctggtgattggaggcagtccctgcaatgacctctccattgtcaaccctgcccgcaagggactttatgagggtactggccgcctcttctttgagttctaccgcctcctgcatgatgcgcggcccaaggagggagatgatcgccccttcttctggctctttgagaatgtggtggccatgggcgttagtgacaagagggacatctcgcgatttcttgagtctaaccccgtgatgattgacgccaaagaagtgtctgctgcacacagggcccgttacttctggggtaaccttcctggcatgaacaggcctttggcatccactgtgaatgataagctggagctgcaagagtgtctggagcacggcagaatagccaagttcagcaaagtgaggaccattaccaccaggtcaaactctataaagcagggcaaagaccagcatttccccgtcttcatgaacgagaaggaggacatcctgtggtgcactgaaatggaaagggtgtttggcttccccgtccactacacagacgtctccaacatgagccgcttggcgaggcagagactgctgggccgatcgtggagcgtgccggtcatccgccacctcttcgctccgctgaaggaatattttgcttgtgtgtctagcggcaatagtaacgctaacagccgcgggccgagcttcagcagcggcctggtgccgttaagcttgcgcggcagccatatgttcgaaaccgtgcctgtgtggaggagacagccagtccgggtgctgtccctttttgaagacatcaagaaagagctgacgagtttgggctttttggaaagtggttctgacccgggacaactgaagcatgtggttgatgtcacagacacagtgaggaaggatgtggaggagtggggacccttcgatcttgtgtacggcgccacacctcccctgggccacacctgtgaccgtcctcccagctggtacctgttccagttccaccggctcctgcagtacgcacggcccaagccaggcagccccaggcccttcttctggatgttcgtggacaatctggtgctgaacaaggaagacctggacgtcgcatctcgcttcctggagatggagccagtcaccatcccagatgtccacggcggatccttgcagaatgctgtccgcgtgtggagcaacatcccagccataaggagcagcaggcactgggctctggtttcggaagaagaattgtccctgctggcccagaacaagcagagctcgaagctcgcggccaagtggcccaccaagctggtgaagaactgctttctccccctaagagaatatttcaagtatttttcaggagggccgagctctggcgcacccccaccaagtggagggtctcctgccgggtccccaacatctactgaagaaggcaccagcgaatccgcaacgcccgagtcaggccctggtacctccacagaaccatctgaaggtagtgcgcctggttccccagctggaagccctacttccaccgaagaaggcacgtcaaccgaaccaagtgaaggatctgcccctgggaccagcactgaaccatctgagcggacactcgagctgttccgcgacgtggccattgtgttctctcaagaggaatggcagtggctggcccctgctcagagagatctctaccgcgacgttatgctggagacatactccaatctcgtgtccctcggcctggccgtgtccaaacctgatgtgatcagcttcctcgagcagggaaaagaaccttggatgagcggcagcgagacccccggtaccagcgagtccggccctggcacctccacagaaccatctgaaggtagtgcgcctggttccccagctggaagccctacttccaccgaagaaggcacgtcaaccgaaccaagtgaaggatctgcccctgggaccagcactgaaccatctgagccaaaaaagaagagaaaggtaatggacaagaagtacagcatcggcctggccatcggcaccaactctgtgggctgggccgtgatcaccgacgagtacaaggtgcccagcaagaaattcaaggtgctgggcaacaccgaccggcacagcatcaagaagaacctgatcggcgccctgctgttcgacagcggagaaacagccgaggccacccggctgaagagaaccgccagaagaagatacaccagacggaagaaccggatctgctatctgcaagagatcttcagcaacgagatggccaaggtggacgacagcttcttccacagactggaagagtccttcctggtggaagaggataagaagcacgagcggcaccccatcttcggcaacatcgtggacgaggtggcctaccacgagaagtaccccaccatctaccacctgagaaagaaactggtggacagcaccgacaaggccgacctgcggctgatctatctggccctggcccacatgatcaagttccggggccacttcctgatcgagggcgacctgaaccccgacaacagcgacgtggacaagctgttcatccagctggtgcagacctacaaccagctgttcgaggaaaaccccatcaacgccagcggcgtggacgccaaggccatcctgtctgccagactgagcaagagcagacggctggaaaatctgatcgcccagctgcccggcgagaagaagaatggcctgttcggcaacctgattgccctgagcctgggcctgacccccaacttcaagagcaacttcgacctggccgaggatgccaaactgcagctgagcaaggacacctacgacgacgacctggacaacctgctggcccagatcggcgaccagtacgccgacctgtttctggccgccaagaacctgtccgacgccatcctgctgagcgacatcctgagagtgaacaccgagatcaccaaggcccccctgagcgcctctatgatcaagagatacgacgagcaccaccaggacctgaccctgctgaaagctctcgtgcggcagcagctgcctgagaagtacaaagagattttcttcgaccagagcaagaacggctacgccggctacatcgatggcggagccagccaggaagagttctacaagttcatcaagcccatcctggaaaagatggacggcaccgaggaactgctcgtgaagctgaacagagaggacctgctgcggaagcagcggaccttcgacaacggcagcatcccccaccagatccacctgggagagctgcacgccattctgcggcggcaggaagatttttacccattcctgaaggacaaccgggaaaagatcgagaagatcctgaccttccgcatcccctactacgtgggccctctggccaggggaaacagcagattcgcctggatgaccagaaagagcgaggaaaccatcaccccctggaacttcgaggaagtggtggacaagggcgccagcgcccagagcttcatcgagcggatgaccaacttcgataagaacctgcccaacgagaaggtgctgcccaagcacagcctgctgtacgagtacttcaccgtgtacaacgagctgaccaaagtgaaatacgtgaccgagggaatgagaaagcccgccttcctgagcggcgagcagaaaaaagccatcgtggacctgctgttcaagaccaaccggaaagtgaccgtgaagcagctgaaagaggactacttcaagaaaatcgagtgcttcgactccgtggaaatctccggcgtggaagatcggttcaacgcctccctgggcacataccacgatctgctgaaaattatcaaggacaaggacttcctggacaatgaggaaaacgaggacattctggaagatatcgtgctgaccctgacactgtttgaggacagagagatgatcgaggaacggctgaaaacctatgcccacctgttcgacgacaaagtgatgaagcagctgaagcggcggagatacaccggctggggcaggctgagccggaagctgatcaacggcatccgggacaagcagtccggcaagacaatcctggatttcctgaagtccgacggcttcgccaacagaaacttcatgcagctgatccacgacgacagcctgacctttaaagaggacatccagaaagcccaggtgtccggccagggcgatagcctgcacgagcacattgccaatctggccggcagccccgccattaagaagggcatcctgcagacagtgaaggtggtggacgagctcgtgaaagtgatgggccggcacaagcccgagaacatcgtgatcgaaatggccagagagaaccagaccacccagaagggacagaagaacagccgcgagagaatgaagcggatcgaagagggcatcaaagagctgggcagccagatcctgaaagaacaccccgtggaaaacacccagctgcagaacgagaagctgtacctgtactacctgcagaatgggcgggatatgtacgtggaccaggaactggacatcaaccggctgtccgactacgatgtggacgctatcgtgcctcagagctttctgaaggacgactccatcgataacaaagtgctgactcggagcgacaagaaccggggcaagagcgacaacgtgccctccgaagaggtcgtgaagaagatgaagaactactggcgccagctgctgaatgccaagctgattacccagaggaagttcgacaatctgaccaaggccgagagaggcggcctgagcgaactggataaggccggcttcatcaagagacagctggtggaaacccggcagatcacaaagcacgtggcacagatcctggactcccggatgaacactaagtacgacgagaacgacaaactgatccgggaagtgaaagtgatcaccctgaagtccaagctggtgtccgatttccggaaggatttccagttttacaaagtgcgcgagatcaacaactaccaccacgcccacgacgcctacctgaacgccgtcgtgggaaccgccctgatcaaaaagtaccctaagctggaaagcgagttcgtgtacggcgactacaaggtgtacgacgtgcggaagatgatcgccaagagcgagcaggaaatcggcaaggctaccgccaagtacttcttctacagcaacatcatgaactttttcaagaccgagattaccctggccaacggcgagatccggaagcggcctctgatcgagacaaacggcgaaacaggcgagatcgtgtgggataagggccgggactttgccaccgtgcggaaagtgctgtctatgccccaagtgaatatcgtgaaaaagaccgaggtgcagacaggcggcttcagcaaagagtctatcctgcccaagaggaacagcgacaagctgatcgccagaaagaaggactgggaccctaagaagtacggcggcttcgacagccccaccgtggcctattctgtgctggtggtggccaaagtggaaaagggcaagtccaagaaactgaagagtgtgaaagagctgctggggatcaccatcatggaaagaagcagcttcgagaagaatcccatcgactttctggaagccaagggctacaaagaagtgaaaaaggacctgatcatcaagctgcctaagtactccctgttcgagctggaaaacggccggaagagaatgctggcctctgccggcgaactgcagaagggaaacgaactggccctgccctccaaatatgtgaacttcctgtacctggccagccactatgagaagctgaagggctcccccgaggataatgagcagaaacagctgtttgtggaacagcacaaacactacctggacgagatcatcgagcagatcagcgagttctccaagagagtgatcctggccgacgctaatctggacaaggtgctgagcgcctacaacaagcacagagacaagcctatcagagagcaggccgagaatatcatccacctgtttaccctgaccaatctgggagcccctgccgccttcaagtactttgacaccaccatcgaccggaagaggtacaccagcaccaaagaggtgctggacgccaccctgatccaccagagcatcaccggcctgtacgagacacggatcgacctgtctcagctgggaggcgacgcctatccctatgacgtgcccgattatgccagcctgggcagcggctcccccaagaaaaaacgcaaggtggaagatcctaagaaaaagcggaaagtggacggcctcgagtaatga

SEQ ID NO: 226 - DNA, 6471 bp, synthetic construct
  misc_feature 1..6471: note = V41 CDS
  source 1..6471: mol_type = other DNA
atgcctgctgctaagagagtgaaactggatggatccaaccatgaccaggaatttgaccccccaaaggtttacccacctgtgccagctgagaagaggaagcccatccgcgtgctgtctctctttgatgggattgctacagggctcctggtgctgaaggacctgggcatccaagtggaccgctacattgcctccgaggtgtgtgaggactccatcacggtgggcatggtgcggcaccagggaaagatcatgtacgtcggggacgtccgcagcgtcacacagaagcatatccaggagtggggcccattcgacctggtgattggaggcagtccctgcaatgacctctccattgtcaaccctgcccgcaagggactttatgagggtactggccgcctcttctttgagttctaccgcctcctgcatgatgcgcggcccaaggagggagatgatcgccccttcttctggctctttgagaatgtggtggccatgggcgttagtgacaagagggacatctcgcgatttcttgagtctaaccccgtgatgattgacgccaaagaagtgtctgctgcacacagggcccgttacttctggggtaaccttcctggcatgaacaggcctttggcatccactgtgaatgataagctggagctgcaagagtgtctggagcacggcagaatagccaagttcagcaaagtgaggaccattaccaccaggtcaaactctataaagcagggcaaagaccagcatttccccgtcttcatgaacgagaaggaggacatcctgtggtgcactgaaatggaaagggtgtttggcttccccgtccactacacagacgtctccaacatgagccgcttggcgaggcagagactgctgggccgatcgtggagcgtgccggtcatccgccacctcttcgctccgctgaaggaatattttgcttgtgtgtctagcggcaatagtaacgctaacagccgcgggccgagcttcagcagcggcctggtgccgttaagcttgcgcggcagccatatgttcgaaaccgtgcctgtgtggaggagacagccagtccgggtgctgtccctttttgaagacatcaagaaagagctgacgagtttgggctttttggaaagtggttctgacccgggacaactgaagcatgtggttgatgtcacagacacagtgaggaaggatgtggaggagtggggacccttcgatcttgtgtacggcgccacacctcccctgggccacacctgtgaccgtcctcccagctggtacctgttccagttccaccggctcctgcagtacgcacggcccaagccaggcagccccaggcccttcttctggatgttcgtggacaatctggtgctgaacaaggaagacctggacgtcgcatctcgcttcctggagatggagccagtcaccatcccagatgtccacggcggatccttgcagaatgctgtccgcgtgtggagcaacatcccagccataaggagcagcaggcactgggctctggtttcggaagaagaattgtccctgctggcccagaacaagcagagctcgaagctcgcggccaagtggcccaccaagctggtgaagaactgctttctccccctaagagaatatttcaagtatttttcaggagggccgagctctggcgcacccccaccaagtggagggtctcctgccgggtccccaacatctactgaagaaggcaccagcgaatccgcaacgcccgagtcaggccctggtacctccacagaaccatctgaaggtagtgcgcctggttccccagctggaagccctacttccaccgaagaaggcacgtcaaccgaaccaagtgaaggatctgcccctgggaccagcactgaaccatctgagcggacactcatggcctttgaggacgtcgccgtgtatttttcccaagaagaatggggactgctcgacactgcccagagagccctgtatcgcagagtcatgctggacaacttcgccctggtggcctccctgggcctgtctacaagcagacccagagtggtcattcagctggaaagaggcgaggaaccctgggtcagcggcagcgagacccccggtaccagcgagggcggccctggcacctccacagaaccatctgaaggtagtgcgcctggttccccagctggaagccctacttccaccgaagaaggcacgtcaaccgaaccaagtgaaggatctgcccctgggaccagcactgaaccatctgagccaaaaaagaagagaaaggtaatggacaagaagtacagcatcggcctggccatcggcaccaactctgtgggctgggccgtgatcaccgacgagtacaaggtgcccagcaagaaattcaaggtgctgggcaacaccgaccggcacagcatcaagaagaacctgatcggcgccctgctgttcgacagcggagaaacagccgaggccacccggctgaagagaaccgccagaagaagatacaccagacggaagaaccggatctgctatctgcaagagatcttcagcaacgagatggccaaggtggacgacagcttcttccacagactggaagagtccttcctggtggaagaggataagaagcacgagcggcaccccatcttcggcaacatcgtggacgaggtggcctaccacgagaagtaccccaccatctaccacctgagaaagaaactggtggacagcaccgacaaggccgacctgcggctgatctatctggccctggcccacatgatcaagttccggggccacttcctgatcgagggcgacctgaaccccgacaacagcgacgtggacaagctgttcatccagctggtgcagacctacaaccagctgttcgaggaaaaccccatcaacgccagcggcgtggacgccaaggccatcctgtctgccagactgagcaagagcagacggctggaaaatctgatcgcccagctgcccggcgagaagaagaatggcctgttcggcaacctgattgccctgagcctgggcctgacccccaacttcaagagcaacttcgacctggccgaggatgccaaactgcagctgagcaaggacacctacgacgacgacctggacaacctgctggcccagatcggcgaccagtacgccgacctgtttctggccgccaagaacctgtccgacgccatcctgctgagcgacatcctgagagtgaacaccgagatcaccaaggcccccctgagcgcctctatgatcaagagatacgacgagcaccaccaggacctgaccctgctgaaagctctcgtgcggcagcagctgcctgagaagtacaaagagattttcttcgaccagagcaagaacggctacgccggctacatcgatggcggagccagccaggaagagttctacaagttcatcaagcccatcctggaaaagatggacggcaccgaggaactgctcgtgaagctgaacagagaggacctgctgcggaagcagcggaccttcgacaacggcagcatcccccaccagatccacctgggagagctgcacgccattctgcggcggcaggaagatttttacccattcctgaaggacaaccgggaaaagatcgagaagatcctgaccttccgcatcccctactacgtgggccctctggccaggggaaacagcagattcgcctggatgaccagaaagagcgaggaaaccatcaccccctggaacttcgaggaagtggtggacaagggcgccagcgcccagagcttcatcgagcggatgaccaacttcgataagaacctgcccaacgagaaggtgctgcccaagcacagcctgctgtacgagtacttcaccgtgtacaacgagctgaccaaagtgaaatacgtgaccgagggaatgagaaagcccgccttcctgagcggcgagcagaaaaaagccatcgtggacctgctgttcaagaccaaccggaaagtgaccgtgaagcagctgaaagaggactacttcaagaaaatcgagtgcttcgactccgtggaaatctccggcgtggaagatcggttcaacgcctccctgggcacataccacgatctgctgaaaattatcaaggacaaggacttcctggacaatgaggaaaacgaggacattctggaagatatcgtgctgaccctgacactgtttgaggacagagagatgatcgaggaacggctgaaaacctatgcccacctgttcgacgacaaagtgatgaagcagctgaagcggcggagatacaccggctggggcaggctgagccggaagctgatcaacggcatccgggacaagcagtccggcaagacaatcctggatttcctgaagtccgacggcttcgccaacagaaacttcatgcagctgatccacgacgacagcctgacctttaaagaggacatccagaaagcccaggtgtccggccagggcgatagcctgcacgagcacattgccaatctggccggcagccccgccattaagaagggcatcctgcagacagtgaaggtggtggacgagctcgtgaaagtgatgggccggcacaagcccgagaacatcgtgatcgaaatggccagagagaaccagaccacccagaagggacagaagaacagccgcgagagaatgaagcggatcgaagagggcatcaaagagctgggcagccagatcctgaaagaacaccccgtggaaaacacccagctgcagaacgagaagctgtacctgtactacctgcagaatgggcgggatatgtacgtggaccaggaactggacatcaaccggctgtccgactacgatgtggacgctatcgtgcctcagagctttctgaaggacgactccatcgataacaaagtgctgactcggagcgacaagaaccggggcaagagcgacaacgtgccctccgaagaggtcgtgaagaagatgaagaactactggcgccagctgctgaatgccaagctgattacccagaggaagttcgacaatctgaccaaggccgagagaggcggcctgagcgaactggataaggccggcttcatcaagagacagctggtggaaacccggcagatcacaaagcacgtggcacagatcctggactcccggatgaacactaagtacgacgagaacgacaaactgatccgggaagtgaaagtgatcaccctgaagtccaagctggtgtccgatttccggaaggatttccagttttacaaagtgcgcgagatcaacaactaccaccacgcccacgacgcctacctgaacgccgtcgtgggaaccgccctgatcaaaaagtaccctaagctggaaagcgagttcgtgtacggcgactacaaggtgtacgacgtgcggaagatgatcgccaagagcgagcaggaaatcggcaaggctaccgccaagtacttcttctacagcaacatcatgaactttttcaagaccgagattaccctggccaacggcgagatccggaagcggcctctgatcgagacaaacggcgaaacaggcgagatcgtgtgggataagggccgggactttgccaccgtgcggaaagtgctgtctatgccccaagtgaatatcgtgaaaaagaccgaggtgcagacaggcggcttcagcaaagagtctatcctgcccaagaggaacagcgacaagctgatcgccagaaagaaggactgggaccctaagaagtacggcggcttcgacagccccaccgtggcctattctgtgctggtggtggccaaagtggaaaagggcaagtccaagaaactgaagagtgtgaaagagctgctggggatcaccatcatggaaagaagcagcttcgagaagaatcccatcgactttctggaagccaagggctacaaagaagtgaaaaaggacctgatcatcaagctgcctaagtactccctgttcgagctggaaaacggccggaagagaatgctggcctctgccggcgaactgcagaagggaaacgaactggccctgccctccaaatatgtgaacttcctgtacctggccagccactatgagaagctgaagggctcccccgaggataatgagcagaaacagctgtttgtggaacagcacaaacactacctggacgagatcatcgagcagatcagcgagttctccaagagagtgatcctggccgacgctaatctggacaaggtgctgagcgcctacaacaagcacagagacaagcctatcagagagcaggccgagaatatcatccacctgtttaccctgaccaatctgggagcccctgccgccttcaagtactttgacaccaccatcgaccggaagaggtacaccagcaccaaagaggtgctggacgccaccctgatccaccagagcatcaccggcctgtacgagacacggatcgacctgtctcagctgggaggcgacgcctatccctatgacgtgcccgattatgccagcctgggcagcggctcccccaagaaaaaacgcaaggtggaagatcctaagaaaaagcggaaagtggacggcctcgagtaatga

SEQ ID NO: 227 - DNA, 7275 bp, synthetic construct
  misc_feature 1..7275: note = V42 CDS
  source 1..7275: mol_type = other DNA
atgcctgctgctaagagagtgaaactggatggatccaaccatgaccaggaatttgaccccccaaaggtttacccacctgtgccagctgagaagaggaagcccatccgcgtgctgtctctctttgatgggattgctacagggctcctggtgctgaaggacctgggcatccaagtggaccgctacattgcctccgaggtgtgtgaggactccatcacggtgggcatggtgcggcaccagggaaagatcatgtacgtcggggacgtccgcagcgtcacacagaagcatatccaggagtggggcccattcgacctggtgattggaggcagtccctgcaatgacctctccattgtcaaccctgcccgcaagggactttatgagggtactggccgcctcttctttgagttctaccgcctcctgcatgatgcgcggcccaaggagggagatgatcgccccttcttctggctctttgagaatgtggtggccatgggcgttagtgacaagagggacatctcgcgatttcttgagtctaaccccgtgatgattgacgccaaagaagtgtctgctgcacacagggcccgttacttctggggtaaccttcctggcatgaacaggcctttggcatccactgtgaatgataagctggagctgcaagagtgtctggagcacggcagaatagccaagttcagcaaagtgaggaccattaccaccaggtcaaactctataaagcagggcaaagaccagcatttccccgtcttcatgaacgagaaggaggacatcctgtggtgcactgaaatggaaagggtgtttggcttccccgtccactacacagacgtctccaacatgagccgcttggcgaggcagagactgctgggccgatcgtggagcgtgccggtcatccgccacctcttcgctccgctgaaggaatattttgcttgtgtgtctagcggcaatagtaacgctaacagccgcgggccgagcttcagcagcggcctggtgccgttaagcttgcgcggcagccatatgttcgaaaccgtgcctgtgtggaggagacagccagtccgggtgctgtccctttttgaagacatcaagaaagagctgacgagtttgggctttttggaaagtggttctgacccgggacaactgaagcatgtggttgatgtcacagacacagtgaggaaggatgtggaggagtggggacccttcgatcttgtgtacggcgccacacctcccctgggccacacctgtgaccgtcctcccagctggtacctgttccagttccaccggctcctgcagtacgcacggcccaagccaggcagccccaggcccttcttctggatgttcgtggacaatctggtgctgaacaaggaagacctggacgtcgcatctcgcttcctggagatggagccagtcaccatcccagatgtccacggcggatccttgcagaatgctgtccgcgtgtggagcaacatcccagccataaggagcagcaggcactgggctctggtttcggaagaagaattgtccctgctggcccagaacaagcagagctcgaagctcgcggccaagtggcccaccaagctggtgaagaactgctttctccccctaagagaatatttcaagtatttttcaggagggccgagctctggcagcgagctgattaaggagaacatgcacatgaagctgtacatggagggcaccgtggacaaccatcacttcaagtgcacatccgagggcgaaggcaagccctacgagggcacccagaccatgagaatcaaggtggtcgagggcggccctctccccttcgccttcgacatcctggctactagcttcctctacggcagcaagaccttcatcaaccacacccagggcatccccgacttcttcaagcagtccttccctgagggcttcacatgggagagagtcaccacatacgaagacgggggcgtgctgaccgctacccaggacaccagcctccaggacggctgcctcatctacaacgtcaagatcagaggggtgaacttcacatccaacggccctgtgatgcagaagaaaacactcggctgggaggccttcaccgaaacgctgtaccccgctgacggcggcctggaaggcagaaacgacatggccctgaagctcgtgggcgggagccatctgatcgcaaacatcaagaccacatatagatccaagaaacccgctaagaacctcaagatgcctggcgtctactatgtggactacagactggaaagaatcaaggaggccaacaacgagacctacgtcgagcagcacgaggtggcagtggccagatactgcgacctccctagcaaactggggcacaagcttaatgcacccccaccaagtggagggtctcctgccgggtccccaacatctactgaagaaggcaccagcgaatccgcaacgcccgagtcaggccctggtacctccacagaaccatctgaaggtagtgcgcctggttccccagctggaagccctacttccaccgaagaaggcacgtcaaccgaaccaagtgaaggatctgcccctgggaccagcactgaaccatctgagatgaacaattcccagggaagagtgaccttcgaggacgtgaccgtgaacttcacccaaggcgagtggcagagactgaaccccgagcagagaaacctgtaccgggacgtgatgctggaaaactacagcaacctggtgtccgtcggccagggcgagacaacaaagcctgacgtgatcctgcggctggaacagggcaaagagccttggctggaagaggaagaggtgctcggatctggcagagccgagaagaatggcgatatcggcggacagatctggaagccaaaggatgtgaaagagagtctcagcggcagcgagacccccggtaccagcgagggcggccctggcacctccacagaaccatctgaaggtagtgcgcctggttccccagctggaagccctacttccaccgaagaaggcacgtcaaccgaaccaagtgaaggatctgcccctgggaccagcactgaaccatctgagccaaaaaagaagagaaaggtaatggacaagaagtacagcatcggcctggccatcggcaccaactctgtgggctgggccgtgatcaccgacgagtacaaggtgcccagcaagaaattcaaggtgctgggcaacaccgaccggcacagcatcaagaagaacctgatcggcgccctgctgttcgacagcggagaaacagccgaggccacccggctgaagagaaccgccagaagaagatacaccagacggaagaaccggatctgctatctgcaagagatcttcagcaacgagatggccaaggtggacgacagcttcttccacagactggaagagtccttcctggtggaagaggataagaagcacgagcggcaccccatcttcggcaacatcgtggacgaggtggcctaccacgagaagtaccccaccatctaccacctgagaaagaaactggtggacagcaccgacaaggccgacctgcggctgatctatctggccctggcccacatgatcaagttccggggccacttcctgatcgagggcgacctgaaccccgacaacagcgacgtggacaagctgttcatccagctggtgcagacctacaaccagctgttcgaggaaaaccccatcaacgccagcggcgtggacgccaaggccatcctgtctgccagactgagcaagagcagacggctggaaaatctgatcgcccagctgcccggcgagaagaagaatggcctgttcggcaacctgattgccctgagcctgggcctgacccccaacttcaagagcaacttcgacctggccgaggatgccaaactgcagctgagcaaggacacctacgacgacgacctggacaacctgctggcccagatcggcgaccagtacgccgacctgtttctggccgccaagaacctgtccgacgccatcctgctgagcgacatcctgagagtgaacaccgagatcaccaaggcccccctgagcgcctctatgatcaagagatacgacgagcaccaccaggacctgaccctgctgaaagctctcgtgcggcagcagctgcctgagaagtacaaagagattttcttcgaccagagcaagaacggctacgccggctacatcgatggcggagccagccaggaagagttctacaagttcatcaagcccatcctggaaaagatggacggcaccgaggaactgctcgtgaagctgaacagagaggacctgctgcggaagcagcggaccttcgacaacggcagcatcccccaccagatccacctgggagagctgcacgccattctgcggcggcaggaagatttttacccattcctgaaggacaaccgggaaaagatcgagaagatcctgaccttccgcatcccctactacgtgggccctctggccaggggaaacagcagattcgcctggatgaccagaaagagcgaggaaaccatcaccccctggaacttcgaggaagtggtggacaagggcgccagcgcccagagcttcatcgagcggatgaccaacttcgataagaacctgcccaacgagaaggtgctgcccaagcacagcctgctgtacgagtacttcaccgtgtacaacgagctgaccaaagtgaaatacgtgaccgagggaatgagaaagcccgccttcctgagcggcgagcagaaaaaagccatcgtggacctgctgttcaagaccaaccggaaagtgaccgtgaagcagctgaaagaggactacttcaagaaaatcgagtgcttcgactccgtggaaatctccggcgtggaagatcggttcaacgcctccctgggcacataccacgatctgctgaaaattatcaaggacaaggacttcctggacaatgaggaaaacgaggacattctggaagatatcgtgctgaccctgacactgtttgaggacagagagatgatcgaggaacggctgaaaacctatgcccacctgttcgacgacaaagtgatgaagcagctgaagcggcggagatacaccggctggggcaggctgagccggaagctgatcaacggcatccgggacaagcagtccggcaagacaatcctggatttcctgaagtccgacggcttcgccaacagaaacttcatgcagctgatccacgacgacagcctgacctttaaagaggacatccagaaagcccaggtgtccggccagggcgatagcctgcacgagcacattgccaatctggccggcagccccgccattaagaagggcatcctgcagacagtgaaggtggtggacgagctcgtgaaagtgatgggccggcacaagcccgagaacatcgtgatcgaaatggccagagagaaccagaccacccagaagggacagaagaacagccgcgagagaatgaagcggatcgaagagggcatcaaagagctgggcagccagatcctgaaagaacaccccgtggaaaacacccagctgcagaacgagaagctgtacctgtactacctgcagaatgggcgggatatgtacgtggaccaggaactggacatcaaccggctgtccgactacgatgtggacgctatcgtgcctcagagctttctgaaggacgactccatcgataacaaagtgctgactcggagcgacaagaaccggggcaagagcgacaacgtgccctccgaagaggtcgtgaagaagatgaagaactactggcgccagctgctgaatgccaagctgattacccagaggaagttcgacaatctgaccaaggccgagagaggcggcctgagcgaactggataaggccggcttcatcaagagacagctggtggaaacccggcagatcacaaagcacgtggcacagatcctggactcccggatgaacactaagtacgacgagaacgacaaactgatccgggaagtgaaagtgatcaccctgaagtccaagctggtgtccgatttccggaaggatttccagttttacaaagtgcgcgagatcaacaactaccaccacgcccacgacgcctacctgaacgccgtcgtgggaaccgccctgatcaaaaagtaccctaagctggaaagcgagttcgtgtacggcgactacaaggtgtacgacgtgcggaagatgatcgccaagagcgagcaggaaatcggcaaggctaccgccaagtacttcttctacagcaacatcatgaactttttcaagaccgagattaccctggccaacggcgagatccggaagcggcctctgatcgagacaaacggcgaaacaggcgagatcgtgtgggataagggccgggactttgccaccgtgcggaaagtgctgtctatgccccaagtgaatatcgtgaaaaagaccgaggtgcagacaggcggcttcagcaaagagtctatcctgcccaagaggaacagcgacaagctgatcgccagaaagaaggactgggaccctaagaagtacggcggcttcgacagccccaccgtggcctattctgtgctggtggtggccaaagtggaaaagggcaagtccaagaaactgaagagtgtgaaagagctgctggggatcaccatcatggaaagaagcagcttcgagaagaatcccatcgactttctggaagccaagggctacaaagaagtgaaaaaggacctgatcatcaagctgcctaagtactccctgttcgagctggaaaacggccggaagagaatgctggcctctgccggcgaactgcagaagggaaacgaactggccctgccctccaaatatgtgaacttcctgtacctggccagccactatgagaagctgaagggctcccccgaggataatgagcagaaacagctgtttgtggaacagcacaaacactacctggacgagatcatcgagcagatcagcgagttctccaagagagtgatcctggccgacgctaatctggacaaggtgctgagcgcctacaacaagcacagagacaagcctatcagagagcaggccgagaatatcatccacctgtttaccctgaccaatctgggagcccctgccgccttcaagtactttgacaccaccatcgaccggaagaggtacaccagcaccaaagaggtgctggacgccaccctgatccaccagagcatcaccggcctgtacgagacacggatcgacctgtctcagctgggaggcgacgcctatccctatgacgtgcccgattatgccagcctgggcagcggctcccccaagaaaaaacgcaaggtggaagatcctaagaaaaagcggaaagtggacggcctcgagtaatga

SEQ ID NO: 228 - DNA, 6843 bp, synthetic construct
  misc_feature 1..6843: note = V43 CDS
  source 1..6843: mol_type = other DNA
atgcctgctgctaagagagtgaaactggatggatccaaccatgaccaggaatttgaccccccaaaggtttacccacctgtgccagctgagaagaggaagcccatccgcgtgctgtctctctttgatgggattgctacagggctcctggtgctgaaggacctgggcatccaagtggaccgctacattgcctccgaggtgtgtgaggactccatcacggtgggcatggtgcggcaccagggaaagatcatgtacgtcggggacgtccgcagcgtcacacagaagcatatccaggagtggggcccattcgacctggtgattggaggcagtccctgcaatgacctctccattgtcaaccctgcccgcaagggactttatgagggtactggccgcctcttctttgagttctaccgcctcctgcatgatgcgcggcccaaggagggagatgatcgccccttcttctggctctttgagaatgtggtggccatgggcgttagtgacaagagggacatctcgcgatttcttgagtctaaccccgtgatgattgacgccaaagaagtgtctgctgcacacagggcccgttacttctggggtaaccttcctggcatgaacaggcctttggcatccactgtgaatgataagctggagctgcaagagtgtctggagcacggcagaatagccaagttcagcaaagtgaggaccattaccaccaggtcaaactctataaagcagggcaaagaccagcatttccccgtcttcatgaacgagaaggaggacatcctgtggtgcactgaaatggaaagggtgtttggcttccccgtccactacacagacgtctccaacatgagccgcttggcgaggcagagactgctgggccgatcgtggagcgtgccggtcatccgccacctcttcgctccgctgaaggaatattttgcttgtgtgtctagcggcaatagtaacgctaacagccgcgggccgagcttcagcagcggcctggtgccgttaagcttgcgcggcagccatatgttcgaaaccgtgcctgtgtggaggagacagccagtccgggtgctgtccctttttgaagacatcaagaaagagctgacgagtttgggctttttggaaagtggttctgacccgggacaactgaagcatgtggttgatgtcacagacacagtgaggaaggatgtggaggagtggggacccttcgatcttgtgtacggcgccacacctcccctgggccacacctgtgaccgtcctcccagctggtacctgttccagttccaccggctcctgcagtacgcacggcccaagccaggcagccccaggcccttcttctggatgttcgtggacaatctggtgctgaacaaggaagacctggacgtcgcatctcgcttcctggagatggagccagtcaccatcccagatgtccacggcggatccttgcagaatgctgtccgcgtgtggagcaacatcccagccataaggagcagcaggcactgggctctggtttcggaagaagaattgtccctgctggcccagaacaagcagagctcgaagctcgcggccaagtggcccaccaagctggtgaagaactgctttctccccctaagagaatatttcaagtatttttcaggagggccgagctctggcagcgagctgattaaggagaacggcctggaaggcagaaacgacatggccctgaagctcgtgggcgggagccatctgatcgcaaacatcaagaccacatatagatccaagaaacccgctaagaacctcaagatgcctggcgtctactatgtggactacagactggaaagaatcaaggaggccaacaacgagacctacgtcgagcagcacgaggtggcagtggccagatactgcgacctccctagcaaactggggcacaagcttaatgcacccccaccaagtggagggtctcctgccgggtccccaacatctactgaagaaggcaccagcgaatccgcaacgcccgagtcaggccctggtacctccacagaaccatctgaaggtagtgcgcctggttccccagctggaagccctacttccaccgaagaaggcacgtcaaccgaaccaagtgaaggatctgcccctgggaccagcactgaaccatctgagatgaacaattcccagggaagagtgaccttcgaggacgtgaccgtgaacttcacccaaggcgagtggcagagactgaaccccgagcagagaaacctgtaccgggacgtgatgctggaaaactacagcaacctggtgtccgtcggccagggcgagacaacaaagcctgacgtgatcctgcggctggaacagggcaaagagccttggctggaagaggaagaggtgctcggatctggcagagccgagaagaatggcgatatcggcggacagatctggaagccaaaggatgtgaaagagagtctcagcggcagcgagacccccggtaccagcgagggcggccctggcacctccacagaaccatctgaaggtagtgcgcctggttccccagctggaagccctacttccaccgaagaaggcacgtcaaccgaaccaagtgaaggatctgcccctgggaccagcactgaaccatctgagccaaaaaagaagagaaaggtaatggacaagaagtacagcatcggcctggccatcggcaccaactctgtgggctgggccgtgatcaccgacgagtacaaggtgcccagcaagaaattcaaggtgctgggcaacaccgaccggcacagcatcaagaagaacctgatcggcgccctgctgttcgacagcggagaaacagccgaggccacccggctgaagagaaccgccagaagaagatacaccagacggaagaaccggatctgctatctgcaagagatcttcagcaacgagatggccaaggtggacgacagcttcttccacagactggaagagtccttcctggtggaagaggataagaagcacgagcggcaccccatcttcggcaacatcgtggacgaggtggcctaccacgagaagtaccccaccatctaccacctgagaaagaaactggtggacagcaccgacaaggccgacctgcggctgatctatctggccctggcccacatgatcaagttccggggccacttcctgatcgagggcgacctgaaccccgacaacagcgacgtggacaagctgttcatccagctggtgcagacctacaaccagctgttcgaggaaaaccccatcaacgccagcggcgtggacgccaaggccatcctgtctgccagactgagcaagagcagacggctggaaaatctgatcgcccagctgcccggcgagaagaagaatggcctgttcggcaacctgattgccctgagcctgggcctgacccccaacttcaagagcaacttcgacctggccgaggatgccaaactgcagctgagcaaggacacctacgacgacgacctggacaacctgctggcccagatcggcgaccagtacgccgacctgtttctggccgccaagaacctgtccgacgccatcctgctgagcgacatcctgagagtgaacaccgagatcaccaaggcccccctgagcgcctctatgatcaagagatacgacgagcaccaccaggacctgaccctgctgaaagctctcgtgcggcagcagctgcctgagaagtacaaagagattttcttcgaccagagcaagaacggctacgccggctacatcgatggcggagccagccaggaagagttctacaagttcatcaagcccatcctggaaaagatggacggcaccgaggaactgctcgtgaagctgaacagagaggacctgctgcggaagcagcggaccttcgacaacggcagcatcccccaccagatccacctgggagagctgcacgccattctgcggcggcaggaagatttttacccattcctgaaggacaaccgggaaaagatcgagaagatcctgaccttccgcatcccctactacgtgggccctctggccaggggaaacagcagattcgcctggatgaccagaaagagcgaggaaaccatcaccccctggaacttcgaggaagtggtggacaagggcgccagcgcccagagcttcatcgagcggatgaccaacttcgataagaacctgcccaacgagaaggtgctgcccaagcacagcctgctgtacgagtacttcaccgtgtacaacgagctgaccaaagtgaaatacgtgaccgagggaatgagaaagcccgccttcctgagcggcgagcagaaaaaagccatcgtggacctgctgttcaagaccaaccggaaagtgaccgtgaagcagctgaaagaggactacttcaagaaaatcgagtgcttcgactccgtggaaatctccggcgtggaagatcggttcaacgcctccctgggcacataccacgatctgctgaaaattatcaaggacaaggacttcctggacaatgaggaaaacgaggacattctggaagatatcgtgctgaccctgacactgtttgaggacagagagatgatcgaggaacggctgaaaacctatgcccacctgttcgacgacaaagtgatgaagcagctgaagcggcggagatacaccggctggggcaggctgagccggaagctgatcaacggcatccgggacaagcagtccggcaagacaatcctggatttcctgaagtccgacggcttcgccaacagaaacttcatgcagctgatccacgacgacagcctgacctttaaagaggacatccagaaagcccaggtgtccggccagggcgatagcctgcacgagcacattgccaatctggccggcagccccgccattaagaagggcatcctgcagacagtgaaggtggtggacgagctcgtgaaagtgatgggccggcacaagcccgagaacatcgtgatcgaaatggccagagagaaccagaccacccagaagggacagaagaacagccgcgagagaatgaagcggatcgaagagggcatcaaagagctgggcagccagatcctgaaagaacaccccgtggaaaacacccagctgcagaacgagaagctgtacctgtactacctgcagaatgggcgggatatgtacgtggaccaggaactggacatcaaccggctgtccgactacgatgtggacgctatcgtgcctcagagctttctgaaggacgactccatcgataacaaagtgctgactcggagcgacaagaaccggggcaagagcgacaacgtgccctccgaagaggtcgtgaagaagatgaagaactactggcgccagctgctgaatgccaagctgattacccagaggaagttcgacaatctgaccaaggccgagagaggcggcctgagcgaactggataaggccggcttcatcaagagacagctggtggaaacccggcagatcacaaagcacgtggcacagatcctggactcccggatgaacactaagtacgacgagaacgacaaactgatccgggaagtgaaagtgatcaccctgaagtccaagctggtgtccgatttccggaaggatttccagttttacaaagtgcgcgagatcaacaactaccaccacgcccacgacgcctacctgaacgccgtcgtgggaaccgccctgatcaaaaagtaccctaagctggaaagcgagttcgtgtacggcgactacaaggtgtacgacgtgcggaagatgatcgccaagagcgagcaggaaatcggcaaggctaccgccaagtacttcttctacagcaacatcatgaactttttcaagaccgagattaccctggccaacggcgagatccggaagcggcctctgatcgagacaaacggcgaaacaggcgagatcgtgtgggataagggccgggactttgccaccgtgcggaaagtgctgtctatgccccaagtgaatatcgtgaaaaagaccgaggtgcagacaggcggcttcagcaaagagtctatcctgcccaagaggaacagcgacaagctgatcgccagaaagaaggactgggaccctaagaagtacggcggcttcgacagccccaccgtggcctattctgtgctggtggtggccaaagtggaaaagggcaagtccaagaaactgaagagtgtgaaagagctgctggggatcaccatcatggaaagaagcagcttcgagaagaatcccatcgactttctggaagccaagggctacaaagaagtgaaaaaggacctgatcatcaagctgcctaagtactccctgttcgagctggaaaacggccggaagagaatgctggcctctgccggcgaactgcagaagggaaacgaactggccctgccctccaaatatgtgaacttcctgtacctggccagccactatgagaagctgaagggctcccccgaggataatgagcagaaacagctgtttgtggaacagcacaaacactacctggacgagatcatcgagcagatcagcgagttctccaagagagtgatcctggccgacgctaatctggacaaggtgctgagcgcctacaacaagcacagagacaagcctatcagagagcaggccgagaatatcatccacctgtttaccctgaccaatctgggagcccctgccgccttcaagtactttgacaccaccatcgaccggaagaggtacaccagcaccaaagaggtgctggacgccaccctgatccaccagagcatcaccggcctgtacgagacacggatcgacctgtctcagctgggaggcgacgcctatccctatgacgtgcccgattatgccagcctgggcagcggctcccccaagaaaaaacgcaaggtggaagatcctaagaaaaagcggaaagtggacggcctcgagtaatga

SEQ ID NO: 229 - DNA, 6723 bp, synthetic construct
  misc_feature 1..6723: note = V44 CDS
  source 1..6723: mol_type = other DNA
atgcctgctgctaagagagtgaaactggatggatccaaccatgaccaggaatttgaccccccaaaggtttacccacctgtgccagctgagaagaggaagcccatccgcgtgctgtctctctttgatgggattgctacagggctcctggtgctgaaggacctgggcatccaagtggaccgctacattgcctccgaggtgtgtgaggactccatcacggtgggcatggtgcggcaccagggaaagatcatgtacgtcggggacgtccgcagcgtcacacagaagcatatccaggagtggggcccattcgacctggtgattggaggcagtccctgcaatgacctctccattgtcaaccctgcccgcaagggactttatgagggtactggccgcctcttctttgagttctaccgcctcctgcatgatgcgcggcccaaggagggagatgatcgccccttcttctggctctttgagaatgtggtggccatgggcgttagtgacaagagggacatctcgcgatttcttgagtctaaccccgtgatgattgacgccaaagaagtgtctgctgcacacagggcccgttacttctggggtaaccttcctggcatgaacaggcctttggcatccactgtgaatgataagctggagctgcaagagtgtctggagcacggcagaatagccaagttcagcaaagtgaggaccattaccaccaggtcaaactctataaagcagggcaaagaccagcatttccccgtcttcatgaacgagaaggaggacatcctgtggtgcactgaaatggaaagggtgtttggcttccccgtccactacacagacgtctccaacatgagccgcttggcgaggcagagactgctgggccgatcgtggagcgtgccggtcatccgccacctcttcgctccgctgaaggaatattttgcttgtgtgtctagcggcaatagtaacgctaacagccgcgggccgagcttcagcagcggcctggtgccgttaagcttgcgcggcagccatatgttcgaaaccgtgcctgtgtggaggagacagccagtccgggtgctgtccctttttgaagacatcaagaaagagctgacgagtttgggctttttggaaagtggttctgacccgggacaactgaagcatgtggttgatgtcacagacacagtgaggaaggatgtggaggagtggggacccttcgatcttgtgtacggcgccacacctcccctgggccacacctgtgaccgtcctcccagctggtacctgttccagttccaccggctcctgcagtacgcacggcccaagccaggcagccccaggcccttcttctggatgttcgtggacaatctggtgctgaacaaggaagacctggacgtcgcatctcgcttcctggagatggagccagtcaccatcccagatgtccacggcggatccttgcagaatgctgtccgcgtgtggagcaacatcccagccataaggagcagcaggcactgggctctggtttcggaagaagaattgtccctgctggcccagaacaagcagagctcgaagctcgcggccaagtggcccaccaagctggtgaagaactgctttctccccctaagagaatatttcaagtatttttcaggagggccgagctctggcagcgagctgattaaggagaactactatgtggactacagactggaaagaatcaaggaggccaacaacgagacctacgtcgagcagcacgaggtggcagtggccagatactgcgacctccctagcaaactggggcacaagcttaatgcacccccaccaagtggagggtctcctgccgggtccccaacatctactgaagaaggcaccagcgaatccgcaacgcccgagtcaggccctggtacctccacagaaccatctgaaggtagtgcgcctggttccccagctggaagccctacttccaccgaagaaggcacgtcaaccgaaccaagtgaaggatctgcccctgggaccagcactgaaccatctgagatgaacaattcccagggaagagtgaccttcgaggacgtgaccgtgaacttcacccaaggcgagtggcagagactgaaccccgagcagagaaacctgtaccgggacgtgatgctggaaaactacagcaacctggtgtccgtcggccagggcgagacaacaaagcctgacgtgatcctgcggctggaacagggcaaagagccttggctggaagaggaagaggtgctcggatctggcagagccgagaagaatggcgatatcggcggacagatctggaagccaaaggatgtgaaagagagtctcagcggcagcgagacccccggtaccagcgagggcggccctggcacctccacagaaccatctgaaggtagtgcgcctggttccccagctggaagccctacttccaccgaagaaggcacgtcaaccgaaccaagtgaaggatctgcccctgggaccagcactgaaccatctgagccaaaaaagaagagaaaggtaatggacaagaagtacagcatcggcctggccatcggcaccaactctgtgggctgggccgtgatcaccgacgagtacaaggtgcccagcaagaaattcaaggtgctgggcaacaccgaccggcacagcatcaagaagaacctgatcggcgccctgctgttcgacagcggagaaacagccgaggccacccggctgaagagaaccgccagaagaagatacaccagacggaagaaccggatctgctatctgcaagagatcttcagcaacgagatggccaaggtggacgacagcttcttccacagactggaagagtccttcctggtggaagaggataagaagcacgagcggcaccccatcttcggcaacatcgtggacgaggtggcctaccacgagaagtaccccaccatctaccacctgagaaagaaactggtggacagcaccgacaaggccgacctgcggctgatctatctggccctggcccacatgatcaagttccggggccacttcctgatcgagggcgacctgaaccccgacaacagcgacgtggacaagctgttcatccagctggtgcagacctacaaccagctgttcgaggaaaaccccatcaacgccagcggcgtggacgccaaggccatcctgtctgccagactgagcaagagcagacggctggaaaatctgatcgcccagctgcccggcgagaagaagaatggcctgttcggcaacctgattgccctgagcctgggcctgacccccaacttcaagagcaacttcgacctggccgaggatgccaaactgcagctgagcaaggacacctacgacgacgacctggacaacctgctggcccagatcggcgaccagtacgccgacctgtttctggccgccaagaacctgtccgacgccatcctgctgagcgacatcctgagagtgaacaccgagatcaccaaggcccccctgagcgcctctatgatcaagagatacgacgagcaccaccaggacctgaccctgctgaaagctctcgtgcggcagcagctgcctgagaagtacaaagagattttcttcgaccagagcaagaacggctacgccggctacatcgatggcggagccagccaggaagagttctacaagttcatcaagcccatcctggaaaagatggacggcaccgaggaactgctcgtgaagctgaacagagaggacctgctgcggaagcagcggaccttcgacaacggcagcatcccccaccagatccacctgggagagctgcacgccattctgcggcggcaggaagatttttacccattcctgaaggacaaccgggaaaagatcgagaagatcctgaccttccgcatcccctactacgtgggccctctggccaggggaaacagcagattcgcctggatgaccagaaagagcgaggaaaccatcaccccctggaacttcgaggaagtggtggacaagggcgccagcgcccagagcttcatcgagcggatgaccaacttcgataagaacctgcccaacgagaaggtgctgcccaagcacagcctgctgtacgagtacttcaccgtgtacaacgagctgaccaaagtgaaatacgtgaccgagggaatgagaaagcccgccttcctgagcggcgagcagaaaaaagccatcgtggacctgctgttcaagaccaaccggaaagtgaccgtgaagcagctgaaagaggactacttcaagaaaatcgagtgcttcgactccgtggaaatctccggcgtggaagatcggttcaacgcctccctgggcacataccacgatctgctgaaaattatcaaggacaaggacttcctggacaatgaggaaaacgaggacattctggaagatatcgtgctgaccctgacactgtttgaggacagagagatgatcgaggaacggctgaaaacctatgcccacctgttcgacgacaaagtgatgaagcagctgaagcggcggagatacaccggctggggcaggctgagccggaagctgatcaacggcatccgggacaagcagtccggcaagacaatcctggatttcctgaagtccgacggcttcgccaacagaaacttcatgcagctgatccacgacgacagcctgacctttaaagaggacatccagaaagcccaggtgtccggccagggcgatagcctgcacgagcacattgccaatctggccggcagccccgccattaagaagggcatcctgcagacagtgaaggtggtggacgagctcgtgaaagtgatgggccggcacaagcccgagaacatcgtgatcgaaatggccagagagaaccagaccacccagaagggacagaagaacagccgcgagagaatgaagcggatcgaagagggcatcaaagagctgggcagccagatcctgaaagaacaccccgtggaaaacacccagctgcagaacgagaagctgtacctgtactacctgcagaatgggcgggatatgtacgtggaccaggaactggacatcaaccggctgtccgactacgatgtggacgctatcgtgcctcagagctttctgaaggacgactccatcgataacaaagtgctgactcggagcgacaagaaccggggcaagagcgacaacgtgccctccgaagaggtcgtgaagaagatgaagaactactggcgccagctgctgaatgccaagctgattacccagaggaagttcgacaatctgaccaaggccgagagaggcggcctgagcgaactggataaggccggcttcatcaagagacagctggtggaaacccggcagatcacaaagcacgtggcacagatcctggactcccggatgaacactaagtacgacgagaacgacaaactgatccgggaagtgaaagtgatcaccctgaagtccaagctggtgtccgatttccggaaggatttccagttttacaaagtgcgcgagatcaacaactaccaccacgcccacgacgcctacctgaacgccgtcgtgggaaccgccctgatcaaaaagtaccctaagctggaaagcgagttcgtgtacggcgactacaaggtgtacgacgtgcggaagatgatcgccaagagcgagcaggaaatcggcaaggctaccgccaagtacttcttctacagcaacatcatgaactttttcaagaccgagattaccctggccaacggcgagatccggaagcggcctctgatcgagacaaacggcgaaacaggcgagatcgtgtgggataagggccgggactttgccaccgtgcggaaagtgctgtctatgccccaagtgaatatcgtgaaaaagaccgaggtgcagacaggcggcttcagcaaagagtctatcctgcccaagaggaacagcgacaagctgatcgccagaaagaaggactgggaccctaagaagtacggcggcttcgacagccccaccgtggcctattctgtgctggtggtggccaaagtggaaaagggcaagtccaagaaactgaagagtgtgaaagagctgctggggatcaccatcatggaaagaagcagcttcgagaagaatcccatcgactttctggaagccaagggctacaaagaagtgaaaaaggacctgatcatcaagctgcctaagtactccctgttcgagctggaaaacggccggaagagaatgctggcctctgccggcgaactgcagaagggaaacgaactggccctgccctccaaatatgtgaacttcctgtacctggccagccactatgagaagctgaagggctcccccgaggataatgagcagaaacagctgtttgtggaacagcacaaacactacctggacgagatcatcgagcagatcagcgagttctccaagagagtgatcctggccgacgctaatctggacaaggtgctgagcgcctacaacaagcacagagacaagcctatcagagagcaggccgagaatatcatccacctgtttaccctgaccaatctgggagcccctgccgccttcaagtactttgacaccaccatcgaccggaagaggtacaccagcaccaaagaggtgctggacgccaccctgatccaccagagcatcaccggcctgtacgagacacggatcgacctgtctcagctgggaggcgacgcctatccctatgacgtgcccgattatgccagcctgggcagcggctcccccaagaaaaaacgcaaggtggaagatcctaagaaaaagcggaaagtggacggcctcgagtaatga

SEQ ID NO: 230 - DNA, 6660 bp, synthetic construct
  misc_feature 1..6660: note = V45 CDS
  source 1..6660: mol_type = other DNA
atgcctgctgctaagagagtgaaactggatggatccaaccatgaccaggaatttgaccccccaaaggtttacccacctgtgccagctgagaagaggaagcccatccgcgtgctgtctctctttgatgggattgctacagggctcctggtgctgaaggacctgggcatccaagtggaccgctacattgcctccgaggtgtgtgaggactccatcacggtgggcatggtgcggcaccagggaaagatcatgtacgtcggggacgtccgcagcgtcacacagaagcatatccaggagtggggcccattcgacctggtgattggaggcagtccctgcaatgacctctccattgtcaaccctgcccgcaagggactttatgagggtactggccgcctcttctttgagttctaccgcctcctgcatgatgcgcggcccaaggagggagatgatcgccccttcttctggctctttgagaatgtggtggccatgggcgttagtgacaagagggacatctcgcgatttcttgagtctaaccccgtgatgattgacgccaaagaagtgtctgctgcacacagggcccgttacttctggggtaaccttcctggcatgaacaggcctttggcatccactgtgaatgataagctggagctgcaagagtgtctggagcacggcagaatagccaagttcagcaaagtgaggaccattaccaccaggtcaaactctataaagcagggcaaagaccagcatttccccgtcttcatgaacgagaaggaggacatcctgtggtgcactgaaatggaaagggtgtttggcttccccgtccactacacagacgtctccaacatgagccgcttggcgaggcagagactgctgggccgatcgtggagcgtgccggtcatccgccacctcttcgctccgctgaaggaatattttgcttgtgtgtctagcggcaatagtaacgctaacagccgcgggccgagcttcagcagcggcctggtgccgttaagcttgcgcggcagccatatgttcgaaaccgtgcctgtgtggaggagacagccagtccgggtgctgtccctttttgaagacatcaagaaagagctgacgagtttgggctttttggaaagtggttctgacccgggacaactgaagcatgtggttgatgtcacagacacagtgaggaaggatgtggaggagtggggacccttcgatcttgtgtacggcgccacacctcccctgggccacacctgtgaccgtcctcccagctggtacctgttccagttccaccggctcctgcagtacgcacggcccaagccaggcagccccaggcccttcttctggatgttcgtggacaatctggtgctgaacaaggaagacctggacgtcgcatctcgcttcctggagatggagccagtcaccatcccagatgtccacggcggatccttgcagaatgctgtccgcgtgtggagcaacatcccagccataaggagcagcaggcactgggctctggtttcggaagaagaattgtccctgctggcccagaacaagcagagctcgaagctcgcggccaagtggcccaccaagctggtgaagaactgctttctccccctaagagaatatttcaagtatttttcaggagggccgagctctggcgcacccccaccaagtggagggtctcctgccgggtccccaacatctactgaagaaggcaccagcgaatccgcaacgcccgagtcaggccctggtacctccacagaaccatctgaaggtagtgcgcctggttccccagctggaagccctacttccaccgaagaaggcacgtcaaccgaaccaagtgaaggatctgcccctgggaccagcactgaaccatctgagatgaacaattcccagggaagagtgaccttcgaggacgtgaccgtgaacttcacccaaggcgagtggcagagactgaaccccgagcagagaaacctgtaccgggacgtgatgctggaaaactacagcaacctggtgtccgtcggccagggcgagacaacaaagcctgacgtgatcctgcggctggaacagggcaaagagccttggctggaagaggaagaggtgctcggatctggcagagccgagaagaatggcgatatcggcggacagatctggaagccaaaggatgtgaaagagagtctcagcggcagcggcagcggatcaggcggatctggcagcggtggatctggttctggatccggcggctccggtagtggtggaagtggctctggggagacccccggtaccagcgagggcggccctggcacctccacagaaccatctgaaggtagtgcgcctggttccccagctggaagccctacttccaccgaagaaggcacgtcaaccgaaccaagtgaaggatctgcccctgggaccagcactgaaccatctgagccaaaaaagaagagaaaggtaatggacaagaagtacagcatcggcctggccatcggcaccaactctgtgggctgggccgtgatcaccgacgagtacaaggtgcccagcaagaaattcaaggtgctgggcaacaccgaccggcacagcatcaagaagaacctgatcggcgccctgctgttcgacagcggagaaacagccgaggccacccggctgaagagaaccgccagaagaagatacaccagacggaagaaccggatctgctatctgcaagagatcttcagcaacgagatggccaaggtggacgacagcttcttccacagactggaagagtccttcctggtggaagaggataagaagcacgagcggcaccccatcttcggcaacatcgtggacgaggtggcctaccacgagaagtaccccaccatctaccacctgagaaagaaactggtggacagcaccgacaaggccgacctgcggctgatctatctggccctggcccacatgatcaagttccggggccacttcctgatcgagggcgacctgaaccccgacaacagcgacgtggacaagctgttcatccagctggtgcagacctacaaccagctgttcgaggaaaaccccatcaacgccagcggcgtggacgccaaggccatcctgtctgccagactgagcaagagcagacggctggaaaatctgatcgcccagctgcccggcgagaagaagaatggcctgttcggcaacctgattgccctgagcctgggcctgacccccaacttcaagagcaacttcgacctggccgaggatgccaaactgcagctgagcaaggacacctacgacgacgacctggacaacctgctggcccagatcggcgaccagtacgccgacctgtttctggccgccaagaacctgtccgacgccatcctgctgagcgacatcctgagagtgaacaccgagatcaccaaggcccccctgagcgcctctatgatcaagagatacgacgagcaccaccaggacctgaccctgctgaaagctctcgtgcggcagcagctgcctgagaagtacaaagagattttcttcgaccagagcaagaacggctacgccggctacatcgatggcggagccagccaggaagagttctacaagttcatcaagcccatcctggaaaagatggacggcaccgaggaactgctcgtgaagctgaacagagaggacctgctgcggaagcagcggaccttcgacaacggcagcatcccccaccagatccacctgggagagctgcacgccattctgcggcggcaggaagatttttacccattcctgaaggacaaccgggaaaagatcgagaagatcctgaccttccgcatcccctactacgtgggccctctggccaggggaaacagcagattcgcctggatgaccagaaagagcgaggaaaccatcaccccctggaacttcgaggaagtggtggacaagggcgccagcgcccagagcttcatcgagcggatgaccaacttcgataagaacctgcccaacgagaaggtgctgcccaagcacagcctgctgtacgagtacttcaccgtgtacaacgagctgaccaaagtgaaatacgtgaccgagggaatgagaaagcccgccttcctgagcggcgagcagaaaaaagccatcgtggacctgctgttcaagaccaaccggaaagtgaccgtgaagcagctgaaagaggactacttcaagaaaatcgagtgcttcgactccgtggaaatctccggcgtggaagatcggttcaacgcctccctgggcacataccacgatctgctgaaaattatcaaggacaaggacttcctggacaatgaggaaaacgaggacattctggaagatatcgtgctgaccctgacactgtttgaggacagagagatgatcgaggaacggctgaaaacctatgcccacctgttcgacgacaaagtgatgaagcagctgaagcggcggagatacaccggctggggcaggctgagccggaagctgatcaacggcatccgggacaagcagtccggcaagacaatcctggatttcctgaagtccgacggcttcgccaacagaaacttcatgcagctgatccacgacgacagcctgacctttaaagaggacatccagaaagcccaggtgtccggccagggcgatagcctgcacgagcacattgccaatctggccggcagccccgccattaagaagggcatcctgcagacagtgaaggtggtggacgagctcgtgaaagtgatgggccggcacaagcccgagaacatcgtgatcgaaatggccagagagaaccagaccacccagaagggacagaagaacagccgcgagagaatgaagcggatcgaagagggcatcaaagagctgggcagccagatcctgaaagaacaccccgtggaaaacacccagctgcagaacgagaagctgtacctgtactacctgcagaatgggcgggatatgtacgtggaccaggaactggacatcaaccggctgtccgactacgatgtggacgctatcgtgcctcagagctttctgaaggacgactccatcgataacaaagtgctgactcggagcgacaagaaccggggcaagagcgacaacgtgccctccgaagaggtcgtgaagaagatgaagaactactggcgccagctgctgaatgccaagctgattacccagaggaagttcgacaatctgaccaaggccgagagaggcggcctgagcgaactggataaggccggcttcatcaagagacagctggtggaaacccggcagatcacaaagcacgtggcacagatcctggactcccggatgaacactaagtacgacgagaacgacaaactgatccgggaagtgaaagtgatcaccctgaagtccaagctggtgtccgatttccggaaggatttccagttttacaaagtgcgcgagatcaacaactaccaccacgcccacgacgcctacctgaacgccgtcgtgggaaccgccctgatcaaaaagtaccctaagctggaaagcgagttcgtgtacggcgactacaaggtgtacgacgtgcggaagatgatcgccaagagcgagcaggaaatcggcaaggctaccgccaagtacttcttctacagcaacatcatgaactttttcaagaccgagattaccctggccaacggcgagatccggaagcggcctctgatcgagacaaacggcgaaacaggcgagatcgtgtgggataagggccgggactttgccaccgtgcggaaagtgctgtctatgccccaagtgaatatcgtgaaaaagaccgaggtgcagacaggcggcttcagcaaagagtctatcctgcccaagaggaacagcgacaagctgatcgccagaaagaaggactgggaccctaagaagtacggcggcttcgacagccccaccgtggcctattctgtgctggtggtggccaaagtggaaaagggcaagtccaagaaactgaagagtgtgaaagagctgctggggatcaccatcatggaaagaagcagcttcgagaagaatcccatcgactttctggaagccaagggctacaaagaagtgaaaaaggacctgatcatcaagctgcctaagtactccctgttcgagctggaaaacggccggaagagaatgctggcctctgccggcgaactgcagaagggaaacgaactggccctgccctccaaatatgtgaacttcctgtacctggccagccactatgagaagctgaagggctcccccgaggataatgagcagaaacagctgtttgtggaacagcacaaacactacctggacgagatcatcgagcagatcagcgagttctccaagagagtgatcctggccgacgctaatctggacaaggtgctgagcgcctacaacaagcacagagacaagcctatcagagagcaggccgagaatatcatccacctgtttaccctgaccaatctgggagcccctgccgccttcaagtactttgacaccaccatcgaccggaagaggtacaccagcaccaaagaggtgctggacgccaccctgatccaccagagcatcaccggcctgtacgagacacggatcgacctgtctcagctgggaggcgacgcctatccctatgacgtgcccgattatgccagcctgggcagcggctcccccaagaaaaaacgcaaggtggaagatcctaagaaaaagcggaaagtggacggcctcgagtaatga

SEQ ID NO: 231 - DNA, 6730 bp, synthetic construct
  misc_feature 1..6730: note = V46 CDS
  source 1..6730: mol_type = other DNA
atggtgcctgccgccaagagagtgaagctggacggcagcaaccacgaccaagagttcgaccctcctaaggtgtaccctcctgtgccagccgagaagcggaagcctatcagagtgctgagcctgttcgacggaatcgccacaggactgctggtgctgaaggatctgggaatccaggtggaccggtatatcgccagcgaagtgtgcgaggacagcatcacagttggcatggttcgacaccagggcaagattatgtacgtgggcgacgtgcggagcgtgacccagaaacacattcaagagtggggccccttcgacctggttatcggcggcagcccttgcaacgatctgagcatcgtgaaccccgccagaaagggcctgtatgaaggcaccggcagactgttcttcgagttctacagactgctgcacgacgccagacctaaagagggcgacgacagaccattcttctggctgttcgagaacgtggtggctatgggcgtgtccgacaagcgggacatcagccggtttctggaaagcaaccccgtgatgatcgacgccaaagaggtgtccgctgctcaccgggccagatacttttggggcaatctgcccggcatgaacagacctctggccagcaccgtgaacgacaagctggaactgcaagagtgcctggaacacggccggatcgccaagtttagcaaagtgcggaccatcaccaccaggtccaacagcatcaagcagggcaaagaccagcacttccccgtgttcatgaatgagaaagaggacatcctgtggtgcaccgagatggaaagagtgttcggcttccctgtgcactacaccgacgtgtccaacatgagcagactggccagacagaggctgctgggcagatcttggagcgtgccagtgatcagacacctgttcgcccctctgaaagaatacttcgcctgcgtgtccagcggcaacagcaacgccaatagcagaggccctagcttcagctctggactggtgcctttgagcctgagaggcagccacatgttcgagacagtgcctgtgtggcggagacagcccgttagagtgctgtccctgtttgaggacatcaagaaagagctgaccagcctgggcttcctggaaagcggatctgatcctggccagctgaagcacgtggtggacgtgaccgataccgtgcggaaggatgtggaagaatggggcccttttgatctggtgtacggcgccacacctcctctgggccacacatgtgatagacctccaagctggtatctgttccagttccaccggctgctgcagtacgctagacccaagcctggaagccccaggcctttcttttggatgttcgtggacaacctggtcctgaacaaagaggacctggacgtcgccagccggttcctcgaaatggaacctgtgacaatccccgacgtgcacggcggatctctgcagaatgctgtcagagtgtggtctaacatccccgccatcagaagcagcagacactgggcccttgtgtccgaggaagaactgtctctgctggcccagaacaagcagagcagcaagctggccgccaagtggcctacaaagctggtcaagaactgcttcctgcctctgcgcgagtacttcaagtatttcagcggcggacctagctctggcgcccctccacctagcggaggatctccagcaggatctcctaccagcaccgaggaaggcacaagcgagtctgccacacctgagtctggccctggcacatctacagagcctagcgagggatctgcccctggatctcctgctggcagccctacatctaccgaagagggaaccagcacagagccttccgaaggttctgctcctggcacaagcaccgagccaagcgagcctaagaagaagagaaaagtcggcagcggcagcgagacaccaggcacatctgaaagcgctacccctgagagcatgaacaacagccagggcagagtgaccttcgaggatgtgaccgtgaacttcacccaaggcgagtggcagagactgaaccccgagcagagaaacctgtaccgggacgtgatgctggaaaactacagcaacctggtgtccgtcggccagggcgagacaacaaagcctgacgtgatcctgcggctggaacagggaaaagagccttggctggaagaggaagaggtgctcggatctggacgggccgagaagaacggcgatattggcggacagatctggaagcctaaggacgtgaaagagagcctgagcggctctggaagtggctctggtggatctggtagcggaggttctggttccggttctggtggttcaggatctggcggttctggaagcggcgaaacacctggaacaagcgaaggcggaccaggcacctctaccgaaccatctgagggaagcgctccaggttctcctgccggctctccaacaagcacagaagagggcacctccactgagccctctgaaggcagtgctcctggaacttccaccgaaccttccgagccaaagaagaaacgcaaggtgggctccgacaagaagtacagcatcggcctggccatcggcaccaactctgtgggctgggccgtgatcaccgacgagtacaaggtgcccagcaagaaattcaaggtgctgggcaacaccgaccggcacagcatcaagaagaacctgatcggcgccctgctgttcgacagcggagaaacagccgaggccacccggctgaagagaaccgccagaagaagatacaccagacggaagaaccggatctgctatctgcaagagatcttcagcaacgagatggccaaggtggacgacagcttcttccacagactggaagagtccttcctggtggaagaggataagaagcacgagcggcaccccatcttcggcaacatcgtggacgaggtggcctaccacgagaagtaccccaccatctaccacctgagaaagaaactggtggacagcaccgacaaggccgacctgcggctgatctatctggccctggcccacatgatcaagttccggggccacttcctgatcgagggcgacctgaaccccgacaacagcgacgtggacaagctgttcatccagctggtgcagacctacaaccagctgttcgaggaaaaccccatcaacgccagcggcgtggacgccaaggccatcctgtctgccagactgagcaagagcagacggctggaaaatctgatcgcccagctgcccggcgagaagaagaatggcctgttcggcaacctgattgccctgagcctgggcctgacccccaacttcaagagcaacttcgacctggccgaggatgccaaactgcagctgagcaaggacacctacgacgacgacctggacaacctgctggcccagatcggcgaccagtacgccgacctgtttctggccgccaagaacctgtccgacgccatcctgctgagcgacatcctgagagtgaacaccgagatcaccaaggcccccctgagcgcctctatgatcaagagatacgacgagcaccaccaggacctgaccctgctgaaagctctcgtgcggcagcagctgcctgagaagtacaaagagattttcttcgaccagagcaagaacggctacgccggctacatcgatggcggagccagccaggaagagttctacaagttcatcaagcccatcctggaaaagatggacggcaccgaggaactgctcgtgaagctgaacagagaggacctgctgcggaagcagcggaccttcgacaacggcagcatcccccaccagatccacctgggagagctgcacgccattctgcggcggcaggaagatttttacccattcctgaaggacaaccgggaaaagatcgagaagatcctgaccttccgcatcccctactacgtgggccctctggccaggggaaacagcagattcgcctggatgaccagaaagagcgaggaaaccatcaccccctggaacttcgaggaagtggtggacaagggcgccagcgcccagagcttcatcgagcggatgaccaacttcgataagaacctgcccaacgagaaggtgctgcccaagcacagcctgctgtacgagtacttcaccgtgtacaacgagctgaccaaagtgaaatacgtgaccgagggaatgagaaagcccgccttcctgagcggcgagcagaaaaaagccatcgtggacctgctgttcaagaccaaccggaaagtgaccgtgaagcagctgaaagaggactacttcaagaaaatcgagtgcttcgactccgtggaaatctccggcgtggaagatcggttcaacgcctccctgggcacataccacgatctgctgaaaattatcaaggacaaggacttcctggacaatgaggaaaacgaggacattctggaagatatcgtgctgaccctgacactgtttgaggacagagagatgatcgaggaacggctgaaaacctatgcccacctgttcgacgacaaagtgatgaagcagctgaagcggcggagatacaccggctggggcaggctgagccggaagctgatcaacggcatccgggacaagcagtccggcaagacaatcctggatttcctgaagtccgacggcttcgccaacagaaacttcatgcagctgatccacgacgacagcctgacctttaaagaggacatccagaaagcccaggtgtccggccagggcgatagcctgcacgagcacattgccaatctggccggcagccccgccattaagaagggcatcctgcagacagtgaaggtggtggacgagctcgtgaaagtgatgggccggcacaagcccgagaacatcgtgatcgaaatggccagagagaaccagaccacccagaagggacagaagaacagccgcgagagaatgaagcggatcgaagagggcatcaaagagctgggcagccagatcctgaaagaacaccccgtggaaaacacccagctgcagaacgagaagctgtacctgtactacctgcagaatgggcgggatatgtacgtggaccaggaactggacatcaaccggctgtccgactacgatgtggacgctatcgtgcctcagagctttctgaaggacgactccatcgataacaaagtgctgactcggagcgacaagaaccggggcaagagcgacaacgtgccctccgaagaggtcgtgaagaagatgaagaactactggcgccagctgctgaatgccaagctgattacccagaggaagttcgacaatctgaccaaggccgagagaggcggcctgagcgaactggataaggccggcttcatcaagagacagctggtggaaacccggcagatcacaaagcacgtggcacagatcctggactcccggatgaacactaagtacgacgagaacgacaaactgatccgggaagtgaaagtgatcaccctgaagtccaagctggtgtccgatttccggaaggatttccagttttacaaagtgcgcgagatcaacaactaccaccacgcccacgacgcctacctgaacgccgtcgtgggaaccgccctgatcaaaaagtaccctaagctggaaagcgagttcgtgtacggcgactacaaggtgtacgacgtgcggaagatgatcgccaagagcgagcaggaaatcggcaaggctaccgccaagtacttcttctacagcaacatcatgaactttttcaagaccgagattaccctggccaacggcgagatccggaagcggcctctgatcgagacaaacggcgaaacaggcgagatcgtgtgggataagggccgggactttgccaccgtgcggaaagtgctgtctatgccccaagtgaatatcgtgaaaaagaccgaggtgcagacaggcggcttcagcaaagagtctatcctgcccaagaggaacagcgacaagctgatcgccagaaagaaggactgggaccctaagaagtacggcggcttcgacagccccaccgtggcctattctgtgctggtggtggccaaagtggaaaagggcaagtccaagaaactgaagagtgtgaaagagctgctggggatcaccatcatggaaagaagcagcttcgagaagaatcccatcgactttctggaagccaagggctacaaagaagtgaaaaaggacctgatcatcaagctgcctaagtactccctgttcgagctggaaaacggccggaagagaatgctggcctctgccggcgaactgcagaagggaaacgaactggccctgccctccaaatatgtgaacttcctgtacctggccagccactatgagaagctgaagggctcccccgaggataatgagcagaaacagctgtttgtggaacagcacaaacactacctggacgagatcatcgagcagatcagcgagttctccaagagagtgatcctggccgacgctaatctggacaaggtgctgagcgcctacaacaagcacagagacaagcctatcagagagcaggccgagaatatcatccacctgtttaccctgaccaatctgggagcccctgccgccttcaagtactttgacaccaccatcgaccggaagaggtacaccagcaccaaagaggtgctggacgccaccctgatccaccagagcatcaccggcctgtacgagacacggatcgacctgtctcagctgggaggcgacgcctatccctatgacgtgcccgattatgccagcctgggcagcggctcccccaagaaaaaacgcaaggtggaagatcctaagaaaaagcggaaagtgtgataatagg

SEQ ID NO: 232 - DNA, 6552 bp, synthetic construct
  misc_feature 1..6552: note = V47 CDS
  source 1..6552: mol_type = other DNA
atgcctgctgctaagagagtgaaactggatggatccaaccatgaccaggaatttgaccccccaaaggtttacccacctgtgccagctgagaagaggaagcccatccgcgtgctgtctctctttgatgggattgctacagggctcctggtgctgaaggacctgggcatccaagtggaccgctacattgcctccgaggtgtgtgaggactccatcacggtgggcatggtgcggcaccagggaaagatcatgtacgtcggggacgtccgcagcgtcacacagaagcatatccaggagtggggcccattcgacctggtgattggaggcagtccctgcaatgacctctccattgtcaaccctgcccgcaagggactttatgagggtactggccgcctcttctttgagttctaccgcctcctgcatgatgcgcggcccaaggagggagatgatcgccccttcttctggctctttgagaatgtggtggccatgggcgttagtgacaagagggacatctcgcgatttcttgagtctaaccccgtgatgattgacgccaaagaagtgtctgctgcacacagggcccgttacttctggggtaaccttcctggcatgaacaggcctttggcatccactgtgaatgataagctggagctgcaagagtgtctggagcacggcagaatagccaagttcagcaaagtgaggaccattaccaccaggtcaaactctataaagcagggcaaagaccagcatttccccgtgttcatgaacgagaaggaggacatcctgtggtgcactgaaatggaaagggtgtttggcttccccgtccactacacagacgtctccaacatgagccgcttggcgaggcagagactgctgggccgatcgtggagcgtgccggtcatccgccacctcttcgctccgctgaaggaatattttgcttgtgtgtctagcggcaatagtaacgctaacagccgcgggccgagcttcagcagcggcctggtgccgttaagcttgcgcggcagccatatgttcgaaaccgtgcctgtgtggaggagacagccagtccgggtgctgtccctttttgaagacatcaagaaagagctgacgagtttgggctttttggaaagtggttctgacccgggacaactgaagcatgtggttgatgtcacagacacagtgaggaaggatgtggaggagtggggacccttcgatcttgtgtacggcgccacacctcccctgggccacacctgtgaccgtcctcccagctggtacctgttccagttccaccggctcctgcagtacgcacggcccaagccaggcagccccaggcccttcttctggatgttcgtggacaatctggtgctgaacaaggaagacctggacgtcgcatctcgcttcctggagatggagccagtcaccatcccagatgtccacggcggatccttgcagaatgctgtccgcgtgtggagcaacatcccagccataaggagcagcaggcactgggctctggtttcggaagaagaattgtccctgctggcccagaacaagcagagctcgaagctcgcggccaagtggcccaccaagctggtgaagaactgctttctccccctaagagaatatttcaagtatttttcaggagggccgagctctggcgcacccccaccaagtggagggtctcctgccgggtccccaacatctactgaagaaggcaccagcgaatccgcaacgcccgagtcaggccctggtacctccacagaaccatctgaaggtagtgcgcctggttccccagctggaagccctacttccaccgaagaaggcacgtcaaccgaaccaagtgaaggatctgcccctgggaccagcactgaaccatctgagcggacactcctgaccttcagagatgtggccatcgagttcagcctggaagagtggcagtgcctggacacagcccagcggaacctgtacagaaaagtgatgttcgagaactaccggaacctcgtgttcctgggaatcgccgtgtctaagccccacctgatcacctgtctcgagcaagggaaagaaccctggaacagcggcagcggcagcggatcaggcggatctggcagcggtggatctggttctggatccggcggctccggtagtggtggaagtggctctggggagacccccggtaccagcgagggcggccctggcacctccacagaaccatctgaaggtagtgcgcctggttccccagctggaagccctacttccaccgaagaaggcacgtcaaccgaaccaagtgaaggatctgcccctgggaccagcactgaaccatctgagccaaaaaagaagagaaaggtaatggacaagaagtacagcatcggcctggccatcggcaccaactctgtgggctgggccgtgatcaccgacgagtacaaggtgcccagcaagaaattcaaggtgctgggcaacaccgaccggcacagcatcaagaagaacctgatcggcgccctgctgttcgacagcggagaaacagccgaggccacccggctgaagagaaccgccagaagaagatacaccagacggaagaaccggatctgctatctgcaagagatcttcagcaacgagatggccaaggtggacgacagcttcttccacagactggaagagtccttcctggtggaagaggataagaagcacgagcggcaccccatcttcggcaacatcgtggacgaggtggcctaccacgagaagtaccccaccatctaccacctgagaaagaaactggtggacagcaccgacaaggccgacctgcggctgatctatctggccctggcccacatgatcaagttccggggccacttcctgatcgagggcgacctgaaccccgacaacagcgacgtggacaagctgttcatccagctggtgcagacctacaaccagctgttcgaggaaaaccccatcaacgccagcggcgtggacgccaaggccatcctgtctgccagactgagcaagagcagacggctggaaaatctgatcgcccagctgcccggcgagaagaagaatggcctgttcggcaacctgattgccctgagcctgggcctgacccccaacttcaagagcaacttcgacctggccgaggatgccaaactgcagctgagcaaggacacctacgacgacgacctggacaacctgctggcccagatcggcgaccagtacgccgacctgtttctggccgccaagaacctgtccgacgccatcctgctgagcgacatcctgagagtgaacaccgagatcaccaaggcccccctgagcgcctctatgatcaagagatacgacgagcaccaccaggacctgaccctgctgaaagctctcgtgcggcagcagctgcctgagaagtacaaagagattttcttcgaccagagcaagaacggctacgccggctacatcgatggcggagccagccaggaagagttctacaagttcatcaagcccatcctggaaaagatggacggcaccgaggaactgctcgtgaagctgaacagagaggacctgctgcggaagcagcggaccttcgacaacggcagcatcccccaccagatccacctgggagagctgcacgccattctgcggcggcaggaagatttttacccattcctgaaggacaaccgggaaaagatcgagaagatcctgaccttccgcatcccctactacgtgggccctctggccaggggaaacagcagattcgcctggatgaccagaaagagcgaggaaaccatcaccccctggaacttcgaggaagtggtggacaagggcgccagcgcccagagcttcatcgagcggatgaccaacttcgataagaacctgcccaacgagaaggtgctgcccaagcacagcctgctgtacgagtacttcaccgtgtacaacgagctgaccaaagtgaaatacgtgaccgagggaatgagaaagcccgccttcctgagcggcgagcagaaaaaagccatcgtggacctgctgttcaagaccaaccggaaagtgaccgtgaagcagctgaaagaggactacttcaagaaaatcgagtgcttcgactccgtggaaatctccggcgtggaagatcggttcaacgcctccctgggcacataccacgatctgctgaaaattatcaaggacaaggacttcctggacaatgaggaaaacgaggacattctggaagatatcgtgctgaccctgacactgtttgaggacagagagatgatcgaggaacggctgaaaacctatgcccacctgttcgacgacaaagtgatgaagcagctgaagcggcggagatacaccggctggggcaggctgagccggaagctgatcaacggcatccgggacaagcagtccggcaagacaatcctggatttcctgaagtccgacggcttcgccaacagaaacttcatgcagctgatccacgacgacagcctgacctttaaagaggacatccagaaagcccaggtgtccggccagggcgatagcctgcacgagcacattgccaatctggccggcagccccgccattaagaagggcatcctgcagacagtgaaggtggtggacgagctcgtgaaagtgatgggccggcacaagcccgagaacatcgtgatcgaaatggccagagagaaccagaccacccagaagggacagaagaacagccgcgagagaatgaagcggatcgaagagggcatcaaagagctgggcagccagatcctgaaagaacaccccgtggaaaacacccagctgcagaacgagaagctgtacctgtactacctgcagaatgggcgggatatgtacgtggaccaggaactggacatcaaccggctgtccgactacgatgtggacgctatcgtgcctcagagctttctgaaggacgactccatcgataacaaagtgctgactcggagcgacaagaaccggggcaagagcgacaacgtgccctccgaagaggtcgtgaagaagatgaagaactactggcgccagctgctgaatgccaagctgattacccagaggaagttcgacaatctgaccaaggccgagagaggcggcctgagcgaactggataaggccggcttcatcaagagacagctggtggaaacccggcagatcacaaagcacgtggcacagatcctggactcccggatgaacactaagtacgacgagaacgacaaactgatccgggaagtgaaagtgatcaccctgaagtccaagctggtgtccgatttccggaaggatttccagttttacaaagtgcgcgagatcaacaactaccaccacgcccacgacgcctacctgaacgccgtcgtgggaaccgccctgatcaaaaagtaccctaagctggaaagcgagttcgtgtacggcgactacaaggtgtacgacgtgcggaagatgatcgccaagagcgagcaggaaatcggcaaggctaccgccaagtacttcttctacagcaacatcatgaactttttcaagaccgagattaccctggccaacggcgagatccggaagcggcctctgatcgagacaaacggcgaaacaggcgagatcgtgtgggataagggccgggactttgccaccgtgcggaaagtgctgtctatgccccaagtgaatatcgtgaaaaagaccgaggtgcagacaggcggcttcagcaaagagtctatcctgcccaagaggaacagcgacaagctgatcgccagaaagaaggactgggaccctaagaagtacggcggcttcgacagccccaccgtggcctattctgtgctggtggtggccaaagtggaaaagggcaagtccaagaaactgaagagtgtgaaagagctgctggggatcaccatcatggaaagaagcagcttcgagaagaatcccatcgactttctggaagccaagggctacaaagaagtgaaaaaggacctgatcatcaagctgcctaagtactccctgttcgagctggaaaacggccggaagagaatgctggcctctgccggcgaactgcagaagggaaacgaactggccctgccctccaaatatgtgaacttcctgtacctggccagccactatgagaagctgaagggctcccccgaggataatgagcagaaacagctgtttgtggaacagcacaaacactacctggacgagatcatcgagcagatcagcgagttctccaagagagtgatcctggccgacgctaatctggacaaggtgctgagcgcctacaacaagcacagagacaagcctatcagagagcaggccgagaatatcatccacctgtttaccctgaccaatctgggagcccctgccgccttcaagtactttgacaccaccatcgaccggaagaggtacaccagcaccaaagaggtgctggacgccaccctgatccaccagagcatcaccggcctgtacgagacacggatcgacctgtctcagctgggaggcgacgcctatccctatgacgtgcccgattatgccagcctgggcagcggctcccccaagaaaaaacgcaaggtggaagatcctaagaaaaagcggaaagtggacggcctcgagtaatga

SEQ ID NO: 233 - DNA, 6552 bp, synthetic construct
  misc_feature 1..6552: note = V48 CDS
  source 1..6552: mol_type = other DNA
atgcctgctgctaagagagtgaaactggatggatccaaccatgaccaggaatttgaccccccaaaggtttacccacctgtgccagctgagaagaggaagcccatccgcgtgctgtctctctttgatgggattgctacagggctcctggtgctgaaggacctgggcatccaagtggaccgctacattgcctccgaggtgtgtgaggactccatcacggtgggcatggtgcggcaccagggaaagatcatgtacgtcggggacgtccgcagcgtcacacagaagcatatccaggagtggggcccattcgacctggtgattggaggcagtccctgcaatgacctctccattgtcaaccctgcccgcaagggactttatgagggtactggccgcctcttctttgagttctaccgcctcctgcatgatgcgcggcccaaggagggagatgatcgccccttcttctggctctttgagaatgtggtggccatgggcgttagtgacaagagggacatctcgcgatttcttgagtctaaccccgtgatgattgacgccaaagaagtgtctgctgcacacagggcccgttacttctggggtaaccttcctggcatgaacaggcctttggcatccactgtgaatgataagctggagctgcaagagtgtctggagcacggcagaatagccaagttcagcaaagtgaggaccattaccaccaggtcaaactctataaagcagggcaaagaccagcatttccccgtgttcatgaacgagaaggaggacatcctgtggtgcactgaaatggaaagggtgtttggcttccccgtccactacacagacgtctccaacatgagccgcttggcgaggcagagactgctgggccgatcgtggagcgtgccggtcatccgccacctcttcgctccgctgaaggaatattttgcttgtgtgtctagcggcaatagtaacgctaacagccgcgggccgagcttcagcagcggcctggtgccgttaagcttgcgcggcagccatatgttcgaaaccgtgcctgtgtggaggagacagccagtccgggtgctgtccctttttgaagacatcaagaaagagctgacgagtttgggctttttggaaagtggttctgacccgggacaactgaagcatgtggttgatgtcacagacacagtgaggaaggatgtggaggagtggggacccttcgatcttgtgtacggcgccacacctcccctgggccacacctgtgaccgtcctcccagctggtacctgttccagttccaccggctcctgcagtacgcacggcccaagccaggcagccccaggcccttcttctggatgttcgtggacaatctggtgctgaacaaggaagacctggacgtcgcatctcgcttcctggagatggagccagtcaccatcccagatgtccacggcggatccttgcagaatgctgtccgcgtgtggagcaacatcccagccataaggagcagcaggcactgggctctggtttcggaagaagaattgtccctgctggcccagaacaagcagagctcgaagctcgcggccaagtggcccaccaagctggtgaagaactgctttctccccctaagagaatatttcaagtatttttcaggagggccgagctctggcgcacccccaccaagtggagggtctcctgccgggtccccaacatctactgaagaaggcaccagcgaatccgcaacgcccgagtcaggccctggtacctccacagaaccatctgaaggtagtgcgcctggttccccagctggaagccctacttccaccgaagaaggcacgtcaaccgaaccaagtgaaggatctgcccctgggaccagcactgaaccatctgagcggacactcctgacattcgaagatgtcgcagtgctgttcacccgggacgagtggaggaaactggctcccagccagcgcaatctgtatagagatgtgatgctggagaattacagaaatctcgtcagcctggggctgcccttcaccaagcctaaagtgatcagcctgctgcaacaaggcgaggatccttgggaaagcggcagcggcagcggatcaggcggatctggcagcggtggatctggttctggatccggcggctccggtagtggtggaagtggctctggggagacccccggtaccagcgagggcggccctggcacctccacagaaccatctgaaggtagtgcgcctggttccccagctggaagccctacttccaccgaagaaggcacgtcaaccgaaccaagtgaaggatctgcccctgggaccagcactgaaccatctgagccaaaaaagaagagaaaggtaatggacaagaagtacagcatcggcctggccatcggcaccaactctgtgggctgggccgtgatcaccgacgagtacaaggtgcccagcaagaaattcaaggtgctgggcaacaccgaccggcacagcatcaagaagaacctgatcggcgccctgctgttcgacagcggagaaacagccgaggccacccggctgaagagaaccgccagaagaagatacaccagacggaagaaccggatctgctatctgcaagagatcttcagcaacgagatggccaaggtggacgacagcttcttccacagactggaagagtccttcctggtggaagaggataagaagcacgagcggcaccccatcttcggcaacatcgtggacgaggtggcctaccacgagaagtaccccaccatctaccacctgagaaagaaactggtggacagcaccgacaaggccgacctgcggctgatctatctggccctggcccacatgatcaagttccggggccacttcctgatcgagggcgacctgaaccccgacaacagcgacgtggacaagctgttcatccagctggtgcagacctacaaccagctgttcgaggaaaaccccatcaacgccagcggcgtggacgccaaggccatcctgtctgccagactgagcaagagcagacggctggaaaatctgatcgcccagctgcccggcgagaagaagaatggcctgttcggcaacctgattgccctgagcctgggcctgacccccaacttcaagagcaacttcgacctggccgaggatgccaaactgcagctgagcaaggacacctacgacgacgacctggacaacctgctggcccagatcggcgaccagtacgccgacctgtttctggccgccaagaacctgtccgacgccatcctgctgagcgacatcctgagagtgaacaccgagatcaccaaggcccccctgagcgcctctatgatcaagagatacgacgagcaccaccaggacctgaccctgctgaaagctctcgtgcggcagcagctgcctgagaagtacaaagagattttcttcgaccagagcaagaacggctacgccggctacatcgatggcggagccagccaggaagagttctacaagttcatcaagcccatcctggaaaagatggacggcaccgaggaactgctcgtgaagctgaacagagaggacctgctgcggaagcagcggaccttcgacaacggcagcatcccccaccagatccacctgggagagctgcacgccattctgcggcggcaggaagatttttacccattcctgaaggacaaccgggaaaagatcgagaagatcctgaccttccgcatcccctactacgtgggccctctggccaggggaaacagcagattcgcctggatgaccagaaagagcgaggaaaccatcaccccctggaacttcgaggaagtggtggacaagggcgccagcgcccagagcttcatcgagcggatgaccaacttcgataagaacctgcccaacgagaaggtgctgcccaagcacagcctgctgtacgagtacttcaccgtgtacaacgagctgaccaaagtgaaatacgtgaccgagggaatgagaaagcccgccttcctgagcggcgagcagaaaaaagccatcgtggacctgctgttcaagaccaaccggaaagtgaccgtgaagcagctgaaagaggactacttcaagaaaatcgagtgcttcgactccgtggaaatctccggcgtggaagatcggttcaacgcctccctgggcacataccacgatctgctgaaaattatcaaggacaaggacttcctggacaatgaggaaaacgaggacattctggaagatatcgtgctgaccctgacactgtttgaggacagagagatgatcgaggaacggctgaaaacctatgcccacctgttcgacgacaaagtgatgaagcagctgaagcggcggagatacaccggctggggcaggctgagccggaagctgatcaacggcatccgggacaagcagtccggcaagacaatcctggatttcctgaagtccgacggcttcgccaacagaaacttcatgcagctgatccacgacgacagcctgacctttaaagaggacatccagaaagcccaggtgtccggccagggcgatagcctgcacgagcacattgccaatctggccggcagccccgccattaagaagggcatcctgcagacagtgaaggtggtggacgagctcgtgaaagtgatgggccggcacaagcccgagaacatcgtgatcgaaatggccagagagaaccagaccacccagaagggacagaagaacagccgcgagagaatgaagcggatcgaagagggcatcaaagagctgggcagccagatcctgaaagaacaccccgtggaaaacacccagctgcagaacgagaagctgtacctgtactacctgcagaatgggcgggatatgtacgtggaccaggaactggacatcaaccggctgtccgactacgatgtggacgctatcgtgcctcagagctttctgaaggacgactccatcgataacaaagtgctgactcggagcgacaagaaccggggcaagagcgacaacgtgccctccgaagaggtcgtgaagaagatgaagaactactggcgccagctgctgaatgccaagctgattacccagaggaagttcgacaatctgaccaaggccgagagaggcggcctgagcgaactggataaggccggcttcatcaagagacagctggtggaaacccggcagatcacaaagcacgtggcacagatcctggactcccggatgaacactaagtacgacgagaacgacaaactgatccgggaagtgaaagtgatcaccctgaagtccaagctggtgtccgatttccggaaggatttccagttttacaaagtgcgcgagatcaacaactaccaccacgcccacgacgcctacctgaacgccgtcgtgggaaccgccctgatcaaaaagtaccctaagctggaaagcgagttcgtgtacggcgactacaaggtgtacgacgtgcggaagatgatcgccaagagcgagcaggaaatcggcaaggctaccgccaagtacttcttctacagcaacatcatgaactttttcaagaccgagattaccctggccaacggcgagatccggaagcggcctctgatcgagacaaacggcgaaacaggcgagatcgtgtgggataagggccgggactttgccaccgtgcggaaagtgctgtctatgccccaagtgaatatcgtgaaaaagaccgaggtgcagacaggcggcttcagcaaagagtctatcctgcccaagaggaacagcgacaagctgatcgccagaaagaaggactgggaccctaagaagtacggcggcttcgacagccccaccgtggcctattctgtgctggtggtggccaaagtggaaaagggcaagtccaagaaactgaagagtgtgaaagagctgctggggatcaccatcatggaaagaagcagcttcgagaagaatcccatcgactttctggaagccaagggctacaaagaagtgaaaaaggacctgatcatcaagctgcctaagtactccctgttcgagctggaaaacggccggaagagaatgctggcctctgccggcgaactgcagaagggaaacgaactggccctgccctccaaatatgtgaacttcctgtacctggccagccactatgagaagctgaagggctcccccgaggataatgagcagaaacagctgtttgtggaacagcacaaacactacctggacgagatcatcgagcagatcagcgagttctccaagagagtgatcctggccgacgctaatctggacaaggtgctgagcgcctacaacaagcacagagacaagcctatcagagagcaggccgagaatatcatccacctgtttaccctgaccaatctgggagcccctgccgccttcaagtactttgacaccaccatcgaccggaagaggtacaccagcaccaaagaggtgctggacgccaccctgatccaccagagcatcaccggcctgtacgagacacggatcgacctgtctcagctgggaggcgacgcctatccctatgacgtgcccgattatgccagcctgggcagcggctcccccaagaaaaaacgcaaggtggaagatcctaagaaaaagcggaaagtggacggcctcgagtaatga

SEQ ID NO: 234 - DNA, 6552 bp, synthetic construct
  misc_feature 1..6552: note = V49 CDS
  source 1..6552: mol_type = other DNA
atgcctgctgctaagagagtgaaactggatggatccaaccatgaccaggaatttgaccccccaaaggtttacccacctgtgccagctgagaagaggaagcccatccgcgtgctgtctctctttgatgggattgctacagggctcctggtgctgaaggacctgggcatccaagtggaccgctacattgcctccgaggtgtgtgaggactccatcacggtgggcatggtgcggcaccagggaaagatcatgtacgtcggggacgtccgcagcgtcacacagaagcatatccaggagtggggcccattcgacctggtgattggaggcagtccctgcaatgacctctccattgtcaaccctgcccgcaagggactttatgagggtactggccgcctcttctttgagttctaccgcctcctgcatgatgcgcggcccaaggagggagatgatcgccccttcttctggctctttgagaatgtggtggccatgggcgttagtgacaagagggacatctcgcgatttcttgagtctaaccccgtgatgattgacgccaaagaagtgtctgctgcacacagggcccgttacttctggggtaaccttcctggcatgaacaggcctttggcatccactgtgaatgataagctggagctgcaagagtgtctggagcacggcagaatagccaagttcagcaaagtgaggaccattaccaccaggtcaaactctataaagcagggcaaagaccagcatttccccgtgttcatgaacgagaaggaggacatcctgtggtgcactgaaatggaaagggtgtttggcttccccgtccactacacagacgtctccaacatgagccgcttggcgaggcagagactgctgggccgatcgtggagcgtgccggtcatccgccacctcttcgctccgctgaaggaatattttgcttgtgtgtctagcggcaatagtaacgctaacagccgcgggccgagcttcagcagcggcctggtgccgttaagcttgcgcggcagccatatgttcgaaaccgtgcctgtgtggaggagacagccagtccgggtgctgtccctttttgaagacatcaagaaagagctgacgagtttgggctttttggaaagtggttctgacccgggacaactgaagcatgtggttgatgtcacagacacagtgaggaaggatgtggaggagtggggacccttcgatcttgtgtacggcgccacacctcccctgggccacacctgtgaccgtcctcccagctggtacctgttccagttccaccggctcctgcagtacgcacggcccaagccaggcagccccaggcccttcttctggatgttcgtggacaatctggtgctgaacaaggaagacctggacgtcgcatctcgcttcctggagatggagccagtcaccatcccagatgtccacggcggatccttgcagaatgctgtccgcgtgtggagcaacatcccagccataaggagcagcaggcactgggctctggtttcggaagaagaattgtccctgctggcccagaacaagcagagctcgaagctcgcggccaagtggcccaccaagctggtgaagaactgctttctccccctaagagaatatttcaagtatttttcaggagggccgagctctggcgcacccccaccaagtggagggtctcctgccgggtccccaacatctactgaagaaggcaccagcgaatccgcaacgcccgagtcaggccctggtacctccacagaaccatctgaaggtagtgcgcctggttccccagctggaagccctacttccaccgaagaaggcacgtcaaccgaaccaagtgaaggatctgcccctgggaccagcactgaaccatctgagcggacactcgttaccttcgaagatgttgccgtgtacttcagccaagaagagtggcggctgctggatgacgcccagagactgctgtatcggaatgttatgctcgaaaacttcaccctgctggcttccctgggactcgccagctctaagacccacgagattacccagctggaatcctgggaagaacccttcatgagcggcagcggcagcggatcaggcggatctggcagcggtggatctggttctggatccggcggctccggtagtggtggaagtggctctggggagacccccggtaccagcgagggcggccctggcacctccacagaaccatctgaaggtagtgcgcctggttccccagctggaagccctacttccaccgaagaaggcacgtcaaccgaaccaagtgaaggatctgcccctgggaccagcactgaaccatctgagccaaaaaagaagagaaaggtaatggacaagaagtacagcatcggcctggccatcggcaccaactctgtgggctgggccgtgatcaccgacgagtacaaggtgcccagcaagaaattcaaggtgctgggcaacaccgaccggcacagcatcaagaagaacctgatcggcgccctgctgttcgacagcggagaaacagccgaggccacccggctgaagagaaccgccagaagaagatacaccagacggaagaaccggatctgctatctgcaagagatcttcagcaacgagatggccaaggtggacgacagcttcttccacagactggaagagtccttcctggtggaagaggataagaagcacgagcggcaccccatcttcggcaacatcgtggacgaggtggcctaccacgagaagtaccccaccatctaccacctgagaaagaaactggtggacagcaccgacaaggccgacctgcggctgatctatctggccctggcccacatgatcaagttccggggccacttcctgatcgagggcgacctgaaccccgacaacagcgacgtggacaagctgttcatccagctggtgcagacctacaaccagctgttcgaggaaaaccccatcaacgccagcggcgtggacgccaaggccatcctgtctgccagactgagcaagagcagacggctggaaaatctgatcgcccagctgcccggcgagaagaagaatggcctgttcggcaacctgattgccctgagcctgggcctgacccccaacttcaagagcaacttcgacctggccgaggatgccaaactgcagctgagcaaggacacctacgacgacgacctggacaacctgctggcccagatcggcgaccagtacgccgacctgtttctggccgccaagaacctgtccgacgccatcctgctgagcgacatcctgagagtgaacaccgagatcaccaaggcccccctgagcgcctctatgatcaagagatacgacgagcaccaccaggacctgaccctgctgaaagctctcgtgcggcagcagctgcctgagaagtacaaagagattttcttcgaccagagcaagaacggctacgccggctacatcgatggcggagccagccaggaagagttctacaagttcatcaagcccatcctggaaaagatggacggcaccgaggaactgctcgtgaagctgaacagagaggacctgctgcggaagcagcggaccttcgacaacggcagcatcccccaccagatccacctgggagagctgcacgccattctgcggcggcaggaagatttttacccattcctgaaggacaaccgggaaaagatcgagaagatcctgaccttccgcatcccctactacgtgggccctctggccaggggaaacagcagattcgcctggatgaccagaaagagcgaggaaaccatcaccccctggaacttcgaggaagtggtggacaagggcgccagcgcccagagcttcatcgagcggatgaccaacttcgataagaacctgcccaacgagaaggtgctgcccaagcacagcctgctgtacgagtacttcaccgtgtacaacgagctgaccaaagtgaaatacgtgaccgagggaatgagaaagcccgccttcctgagcggcgagcagaaaaaagccatcgtggacctgctgttcaagaccaaccggaaagtgaccgtgaagcagctgaaagaggactacttcaagaaaatcgagtgcttcgactccgtggaaatctccggcgtggaagatcggttcaacgcctccctgggcacataccacgatctgctgaaaattatcaaggacaaggacttcctggacaatgaggaaaacgaggacattctggaagatatcgtgctgaccctgacactgtttgaggacagagagatgatcgaggaacggctgaaaacctatgcccacctgttcgacgacaaagtgatgaagcagctgaagcggcggagatacaccggctggggcaggctgagccggaagctgatcaacggcatccgggacaagcagtccggcaagacaatcctggatttcctgaagtccgacggcttcgccaacagaaacttcatgcagctgatccacgacgacagcctgacctttaaagaggacatccagaaagcccaggtgtccggccagggcgatagcctgcacgagcacattgccaatctggccggcagccccgccattaagaagggcatcctgcagacagtgaaggtggtggacgagctcgtgaaagtgatgggccggcacaagcccgagaacatcgtgatcgaaatggccagagagaaccagaccacccagaagggacagaagaacagccgcgagagaatgaagcggatcgaagagggcatcaaagagctgggcagccagatcctgaaagaacaccccgtggaaaacacccagctgcagaacgagaagctgtacctgtactacctgcagaatgggcgggatatgtacgtggaccaggaactggacatcaaccggctgtccgactacgatgtggacgctatcgtgcctcagagctttctgaaggacgactccatcgataacaaagtgctgactcggagcgacaagaaccggggcaagagcgacaacgtgccctccgaagaggtcgtgaagaagatgaagaactactggcgccagctgctgaatgccaagctgattacccagaggaagttcgacaatctgaccaaggccgagagaggcggcctgagcgaactggataaggccggcttcatcaagagacagctggtggaaacccggcagatcacaaagcacgtggcacagatcctggactcccggatgaacactaagtacgacgagaacgacaaactgatccgggaagtgaaagtgatcaccctgaagtccaagctggtgtccgatttccggaaggatttccagttttacaaagtgcgcgagatcaacaactaccaccacgcccacgacgcctacctgaacgccgtcgtgggaaccgccctgatcaaaaagtaccctaagctggaaagcgagttcgtgtacggcgactacaaggtgtacgacgtgcggaagatgatcgccaagagcgagcaggaaatcggcaaggctaccgccaagtacttcttctacagcaacatcatgaactttttcaagaccgagattaccctggccaacggcgagatccggaagcggcctctgatcgagacaaacggcgaaacaggcgagatcgtgtgggataagggccgggactttgccaccgtgcggaaagtgctgtctatgccccaagtgaatatcgtgaaaaagaccgaggtgcagacaggcggcttcagcaaagagtctatcctgcccaagaggaacagcgacaagctgatcgccagaaagaaggactgggaccctaagaagtacggcggcttcgacagccccaccgtggcctattctgtgctggtggtggccaaagtggaaaagggcaagtccaagaaactgaagagtgtgaaagagctgctggggatcaccatcatggaaagaagcagcttcgagaagaatcccatcgactttctggaagccaagggctacaaagaagtgaaaaaggacctgatcatcaagctgcctaagtactccctgttcgagctggaaaacggccggaagagaatgctggcctctgccggcgaactgcagaagggaaacgaactggccctgccctccaaatatgtgaacttcctgtacctggccagccactatgagaagctgaagggctcccccgaggataatgagcagaaacagctgtttgtggaacagcacaaacactacctggacgagatcatcgagcagatcagcgagttctccaagagagtgatcctggccgacgctaatctggacaaggtgctgagcgcctacaacaagcacagagacaagcctatcagagagcaggccgagaatatcatccacctgtttaccctgaccaatctgggagcccctgccgccttcaagtactttgacaccaccatcgaccggaagaggtacaccagcaccaaagaggtgctggacgccaccctgatccaccagagcatcaccggcctgtacgagacacggatcgacctgtctcagctgggaggcgacgcctatccctatgacgtgcccgattatgccagcctgggcagcggctcccccaagaaaaaacgcaaggtggaagatcctaagaaaaagcggaaagtggacggcctcgagtaatga

SEQ ID NO: 235 - DNA, 6594 bp, synthetic construct
  misc_feature 1..6594: note = V50 CDS
  source 1..6594: mol_type = other DNA
atggtccctgctgctaagagagtgaaactggatggatccgacaagaagtacagcatcggcctggccatcggcaccaactctgtgggctgggccgtgatcaccgacgagtacaaggtgcccagcaagaaattcaaggtgctgggcaacaccgaccggcacagcatcaagaagaacctgatcggcgccctgctgttcgacagcggagaaacagccgaggccacccggctgaagagaaccgccagaagaagatacaccagacggaagaaccggatctgctatctgcaagagatcttcagcaacgagatggccaaggtggacgacagcttcttccacagactggaagagtccttcctggtggaagaggataagaagcacgagcggcaccccatcttcggcaacatcgtggacgaggtggcctaccacgagaagtaccccaccatctaccacctgagaaagaaactggtggacagcaccgacaaggccgacctgcggctgatctatctggccctggcccacatgatcaagttccggggccacttcctgatcgagggcgacctgaaccccgacaacagcgacgtggacaagctgttcatccagctggtgcagacctacaaccagctgttcgaggaaaaccccatcaacgccagcggcgtggacgccaaggccatcctgtctgccagactgagcaagagcagacggctggaaaatctgatcgcccagctgcccggcgagaagaagaatggcctgttcggcaacctgattgccctgagcctgggcctgacccccaacttcaagagcaacttcgacctggccgaggatgccaaactgcagctgagcaaggacacctacgacgacgacctggacaacctgctggcccagatcggcgaccagtacgccgacctgtttctggccgccaagaacctgtccgacgccatcctgctgagcgacatcctgagagtgaacaccgagatcaccaaggcccccctgagcgcctctatgatcaagagatacgacgagcaccaccaggacctgaccctgctgaaagctctcgtgcggcagcagctgcctgagaagtacaaagagattttcttcgaccagagcaagaacggctacgccggctacatcgatggcggagccagccaggaagagttctacaagttcatcaagcccatcctggaaaagatggacggcaccgaggaactgctcgtgaagctgaacagagaggacctgctgcggaagcagcggaccttcgacaacggcagcatcccccaccagatccacctgggagagctgcacgccattctgcggcggcaggaagatttttacccattcctgaaggacaaccgggaaaagatcgagaagatcctgaccttccgcatcccctactacgtgggccctctggccaggggaaacagcagattcgcctggatgaccagaaagagcgaggaaaccatcaccccctggaacttcgaggaagtggtggacaagggcgccagcgcccagagcttcatcgagcggatgaccaacttcgataagaacctgcccaacgagaaggtgctgcccaagcacagcctgctgtacgagtacttcaccgtgtacaacgagctgaccaaagtgaaatacgtgaccgagggaatgagaaagcccgccttcctgagcggcgagcagaaaaaagccatcgtggacctgctgttcaagaccaaccggaaagtgaccgtgaagcagctgaaagaggactacttcaagaaaatcgagtgcttcgactccgtggaaatctccggcgtggaagatcggttcaacgcctccctgggcacataccacgatctgctgaaaattatcaaggacaaggacttcctggacaatgaggaaaacgaggacattctggaagatatcgtgctgaccctgacactgtttgaggacagagagatgatcgaggaacggctgaaaacctatgcccacctgttcgacgacaaagtgatgaagcagctgaagcggcggagatacaccggctggggcaggctgagccggaagctgatcaacggcatccgggacaagcagtccggcaagacaatcctggatttcctgaagtccgacggcttcgccaacagaaacttcatgcagctgatccacgacgacagcctgacctttaaagaggacatccagaaagcccaggtgtccggccagggcgatagcctgcacgagcacattgccaatctggccggcagccccgccattaagaagggcatcctgcagacagtgaaggtggtggacgagctcgtgaaagtgatgggccggcacaagcccgagaacatcgtgatcgaaatggccagagagaaccagaccacccagaagggacagaagaacagccgcgagagaatgaagcggatcgaagagggcatcaaagagctgggcagccagatcctgaaagaacaccccgtggaaaacacccagctgcagaacgagaagctgtacctgtactacctgcagaatgggcgggatatgtacgtggaccaggaactggacatcaaccggctgtccgactacgatgtggacgctatcgtgcctcagagctttctgaaggacgactccatcgataacaaagtgctgactcggagcgacaagaaccggggcaagagcgacaacgtgccctccgaagaggtcgtgaagaagatgaagaactactggcgccagctgctgaatgccaagctgattacccagaggaagttcgacaatctgaccaaggccgagagaggcggcctgagcgaactggataaggccggcttcatcaagagacagctggtggaaacccggcagatcacaaagcacgtggcacagatcctggactcccggatgaacactaagtacgacgagaacgacaaactgatccgggaagtgaaagtgatcaccctgaagtccaagctggtgtccgatttccggaaggatttccagttttacaaagtgcgcgagatcaacaactaccaccacgcccacgacgcctacctgaacgccgtcgtgggaaccgccctgatcaaaaagtaccctaagctggaaagcgagttcgtgtacggcgactacaaggtgtacgacgtgcggaagatgatcgccaagagcgagcaggaaatcggcaaggctaccgccaagtacttcttctacagcaacatcatgaactttttcaagaccgagattaccctggccaacggcgagatccggaagcggcctctgatcgagacaaacggcgaaacaggcgagatcgtgtgggataagggccgggactttgccaccgtgcggaaagtgctgtctatgccccaagtgaatatcgtgaaaaagaccgaggtgcagacaggcggcttcagcaaagagtctatcctgcccaagaggaacagcgacaagctgatcgccagaaagaaggactgggaccctaagaagtacggcggcttcgacagccccaccgtggcctattctgtgctggtggtggccaaagtggaaaagggcaagtccaagaaactgaagagtgtgaaagagctgctggggatcaccatcatggaaagaagcagcttcgagaagaatcccatcgactttctggaagccaagggctacaaagaagtgaaaaaggacctgatcatcaagctgcctaagtactccctgttcgagctggaaaacggccggaagagaatgctggcctctgccggcgaactgcagaagggaaacgaactggccctgccctccaaatatgtgaacttcctgtacctggccagccactatgagaagctgaagggctcccccgaggataatgagcagaaacagctgtttgtggaacagcacaaacactacctggacgagatcatcgagcagatcagcgagttctccaagagagtgatcctggccgacgctaatctggacaaggtgctgagcgcctacaacaagcacagagacaagcctatcagagagcaggccgagaatatcatccacctgtttaccctgaccaatctgggagcccctgccgccttcaagtactttgacaccaccatcgaccggaagaggtacaccagcaccaaagaggtgctggacgccaccctgatccaccagagcatcaccggcctgtacgagacacggatcgacctgtctcagctgggaggcgacgcctatccctatgacgtgcccgattatgccagcctgggcagcggctcccccaagaaaaaacgcaaggtggaagatcctaagaaaaagcggaaagtggacggcggagggccgagctctggcgcacccccaccaagtggagggtctcctgccgggtccccaacatctactgaagaaggcaccagcgaatccgcaacgcccgagtcaggccctggtacctccacagaaccatctgaaggtagtgcgcctggttccccagctggaagccctacttccaccgaagaaggcacgtcaaccgaaccaagtgaaggatctgcccctgggaccagcactgaaccatctgagatgggccctatggagatatacaagacagtgtctgcatggaagagacagccagtgcgggtactgagcctcttcagaaacatcgacaaggtactaaagagtttgggcttcttggaaagcggttctggttctgggggaggaacgctgaagtacgtggaagatgtcacaaatgtcgtgaggagagacgtggagaaatggggcccctttgacctggtgtacggctcgacgcagcccctaggcagctcttgtgatcgctgtcccggctggtacatgttccagttccaccggatcctgcagtatgcgctgcctcgccaggagagtcagcggcccttcttctggatattcatggacaatctgctgctgactgaggatgaccaagagacaactacccgcttccttcagacagaggctgtgaccctccaggatgtccgtggcagagactaccagaatgctatgcgggtgtggagcaacattccagggctgaagagcaagcatgcgcccctgaccccaaaggaagaagagtatctgcaagcccaagtcagaagcaggagcaagctggacgccccgaaagttgacctcctggtgaagaactgccttctcccgctgagagagtacttcaagtatttttctcaaaactcacttcctctttctagcggcaatagtaacgctaacagccgcgggccgagcttcagcagcggcctggtgccgttaagcttgcgcggcagccatatgaaccatgaccaggaatttgaccccccaaaggtttacccacctgtgccagctgagaagaggaagcccatccgcgtgctgtctctctttgatgggattgctacagggctcctggtgctgaaggacctgggcatccaagtggaccgctacattgcctccgaggtgtgtgaggactccatcacggtgggcatggtgcggcaccagggaaagatcatgtacgtcggggacgtccgcagcgtcacacagaagcatatccaggagtggggcccattcgacctggtgattggaggcagtccctgcaatgacctctccattgtcaaccctgcccgcaagggactttatgagggtactggccgcctcttctttgagttctaccgcctcctgcatgatgcgcggcccaaggagggagatgatcgccccttcttctggctctttgagaatgtggtggccatgggcgttagtgacaagagggacatctcgcgatttcttgagtctaaccccgtgatgattgacgccaaagaagtgtctgctgcacacagggcccgttacttctggggtaaccttcctggcatgaacaggcctttggcatccactgtgaatgataagctggagctgcaagagtgtctggagcacggcagaatagccaagttcagcaaagtgaggaccattaccaccaggtcaaactctataaagcagggcaaagaccagcatttccccgtcttcatgaacgagaaggaggacatcctgtggtgcactgaaatggaaagggtgtttggcttccccgtccactacacagacgtctccaacatgagccgcttggcgaggcagagactgctgggccgatcgtggagcgtgccggtcatccgccacctcttcgctccgctgaaggaatattttgcttgtgtggacggcagcggcagcgagacccccggtaccagcgagagcgccacccccgagagccggacactggtgaccttcaaggatgtatttgtggacttcaccagggaggagtggaagctgctggacactgctcagcagatcgtgtacagaaatgtgatgctggagaactataagaacctggtttccttgggttatcagcttactaagccagatgtgatcctccggttggagaagggagaagagcccggcagcggcagcgagacccccggtaccagcgagagcgccacccccgagagccggacactggtgaccttcaaggatgtatttgtggacttcaccagggaggagtggaagctgctggacactgctcagcagatcgtgtacagaaatgtgatgctggagaactataagaacctggtttccttgggttatcagcttactaagccagatgtgatcctccggttggagaagggagaagagccctga

SEQ ID NO: 236 - DNA, 6831 bp, synthetic construct
  misc_feature 1..6831: note = V51 CDS
  source 1..6831: mol_type = other DNA
atggtccctgctgctaagagagtgaaactggatggatccgacaagaagtacagcatcggcctggccatcggcaccaactctgtgggctgggccgtgatcaccgacgagtacaaggtgcccagcaagaaattcaaggtgctgggcaacaccgaccggcacagcatcaagaagaacctgatcggcgccctgctgttcgacagcggagaaacagccgaggccacccggctgaagagaaccgccagaagaagatacaccagacggaagaaccggatctgctatctgcaagagatcttcagcaacgagatggccaaggtggacgacagcttcttccacagactggaagagtccttcctggtggaagaggataagaagcacgagcggcaccccatcttcggcaacatcgtggacgaggtggcctaccacgagaagtaccccaccatctaccacctgagaaagaaactggtggacagcaccgacaaggccgacctgcggctgatctatctggccctggcccacatgatcaagttccggggccacttcctgatcgagggcgacctgaaccccgacaacagcgacgtggacaagctgttcatccagctggtgcagacctacaaccagctgttcgaggaaaaccccatcaacgccagcggcgtggacgccaaggccatcctgtctgccagactgagcaagagcagacggctggaaaatctgatcgcccagctgcccggcgagaagaagaatggcctgttcggcaacctgattgccctgagcctgggcctgacccccaacttcaagagcaacttcgacctggccgaggatgccaaactgcagctgagcaaggacacctacgacgacgacctggacaacctgctggcccagatcggcgaccagtacgccgacctgtttctggccgccaagaacctgtccgacgccatcctgctgagcgacatcctgagagtgaacaccgagatcaccaaggcccccctgagcgcctctatgatcaagagatacgacgagcaccaccaggacctgaccctgctgaaagctctcgtgcggcagcagctgcctgagaagtacaaagagattttcttcgaccagagcaagaacggctacgccggctacatcgatggcggagccagccaggaagagttctacaagttcatcaagcccatcctggaaaagatggacggcaccgaggaactgctcgtgaagctgaacagagaggacctgctgcggaagcagcggaccttcgacaacggcagcatcccccaccagatccacctgggagagctgcacgccattctgcggcggcaggaagatttttacccattcctgaaggacaaccgggaaaagatcgagaagatcctgaccttccgcatcccctactacgtgggccctctggccaggggaaacagcagattcgcctggatgaccagaaagagcgaggaaaccatcaccccctggaacttcgaggaagtggtggacaagggcgccagcgcccagagcttcatcgagcggatgaccaacttcgataagaacctgcccaacgagaaggtgctgcccaagcacagcctgctgtacgagtacttcaccgtgtacaacgagctgaccaaagtgaaatacgtgaccgagggaatgagaaagcccgccttcctgagcggcgagcagaaaaaagccatcgtggacctgctgttcaagaccaaccggaaagtgaccgtgaagcagctgaaagaggactacttcaagaaaatcgagtgcttcgactccgtggaaatctccggcgtggaagatcggttcaacgcctccctgggcacataccacgatctgctgaaaattatcaaggacaaggacttcctggacaatgaggaaaacgaggacattctggaagatatcgtgctgaccctgacactgtttgaggacagagagatgatcgaggaacggctgaaaacctatgcccacctgttcgacgacaaagtgatgaagcagctgaagcggcggagatacaccggctggggcaggctgagccggaagctgatcaacggcatccgggacaagcagtccggcaagacaatcctggatttcctgaagtccgacggcttcgccaacagaaacttcatgcagctgatccacgacgacagcctgacctttaaagaggacatccagaaagcccaggtgtccggccagggcgatagcctgcacgagcacattgccaatctggccggcagccccgccattaagaagggcatcctgcagacagtgaaggtggtggacgagctcgtgaaagtgatgggccggcacaagcccgagaacatcgtgatcgaaatggccagagagaaccagaccacccagaagggacagaagaacagccgcgagagaatgaagcggatcgaagagggcatcaaagagctgggcagccagatcctgaaagaacaccccgtggaaaacacccagctgcagaacgagaagctgtacctgtactacctgcagaatgggcgggatatgtacgtggaccaggaactggacatcaaccggctgtccgactacgatgtggacgctatcgtgcctcagagctttctgaaggacgactccatcgataacaaagtgctgactcggagcgacaagaaccggggcaagagcgacaacgtgccctccgaagaggtcgtgaagaagatgaagaactactggcgccagctgctgaatgccaagctgattacccagaggaagttcgacaatctgaccaaggccgagagaggcggcctgagcgaactggataaggccggcttcatcaagagacagctggtggaaacccggcagatcacaaagcacgtggcacagatcctggactcccggatgaacactaagtacgacgagaacgacaaactgatccgggaagtgaaagtgatcaccctgaagtccaagctggtgtccgatttccggaaggatttccagttttacaaagtgcgcgagatcaacaactaccaccacgcccacgacgcctacctgaacgccgtcgtgggaaccgccctgatcaaaaagtaccctaagctggaaagcgagttcgtgtacggcgactacaaggtgtacgacgtgcggaagatgatcgccaagagcgagcaggaaatcggcaaggctaccgccaagtacttcttctacagcaacatcatgaactttttcaagaccgagattaccctggccaacggcgagatccggaagcggcctctgatcgagacaaacggcgaaacaggcgagatcgtgtgggataagggccgggactttgccaccgtgcggaaagtgctgtctatgccccaagtgaatatcgtgaaaaagaccgaggtgcagacaggcggcttcagcaaagagtctatcctgcccaagaggaacagcgacaagctgatcgccagaaagaaggactgggaccctaagaagtacggcggcttcgacagccccaccgtggcctattctgtgctggtggtggccaaagtggaaaagggcaagtccaagaaactgaagagtgtgaaagagctgctggggatcaccatcatggaaagaagcagcttcgagaagaatcccatcgactttctggaagccaagggctacaaagaagtgaaaaaggacctgatcatcaagctgcctaagtactccctgttcgagctggaaaacggccggaagagaatgctggcctctgccggcgaactgcagaagggaaacgaactggccctgccctccaaatatgtgaacttcctgtacctggccagccactatgagaagctgaagggctcccccgaggataatgagcagaaacagctgtttgtggaacagcacaaacactacctggacgagatcatcgagcagatcagcgagttctccaagagagtgatcctggccgacgctaatctggacaaggtgctgagcgcctacaacaagcacagagacaagcctatcagagagcaggccgagaatatcatccacctgtttaccctgaccaatctgggagcccctgccgccttcaagtactttgacaccaccatcgaccggaagaggtacaccagcaccaaagaggtgctggacgccaccctgatccaccagagcatcaccggcctgtacgagacacggatcgacctgtctcagctgggaggcgacgcctatccctatgacgtgcccgattatgccagcctgggcagcggctcccccaagaaaaaacgcaaggtggaagatcctaagaaaaagcggaaagtggacggcggagggccgagctctggcgcacccccaccaagtggagggtctcctgccgggtccccaacatctactgaagaaggcaccagcgaatccgcaacgcccgagtcaggccctggtacctccacagaaccatctgaaggtagtgcgcctggttccccagctggaagccctacttccaccgaagaaggcacgtcaaccgaaccaagtgaaggatctgcccctgggaccagcactgaaccatctgagatgggccctatggagatatacaagacagtgtctgcatggaagagacagccagtgcgggtactgagcctcttcagaaacatcgacaaggtactaaagagtttgggcttcttggaaagcggttctggttctgggggaggaacgctgaagtacgtggaagatgtcacaaatgtcgtgaggagagacgtggagaaatggggcccctttgacctggtgtacggctcgacgcagcccctaggcagctcttgtgatcgctgtcccggctggtacatgttccagttccaccggatcctgcagtatgcgctgcctcgccaggagagtcagcggcccttcttctggatattcatggacaatctgctgctgactgaggatgaccaagagacaactacccgcttccttcagacagaggctgtgaccctccaggatgtccgtggcagagactaccagaatgctatgcgggtgtggagcaacattccagggctgaagagcaagcatgcgcccctgaccccaaaggaagaagagtatctgcaagcccaagtcagaagcaggagcaagctggacgccccgaaagttgacctcctggtgaagaactgccttctcccgctgagagagtacttcaagtatttttctcaaaactcacttcctctttctagcggcaatagtaacgctaacagccgcgggccgagcttcagcagcggcctggtgccgttaagcttgcgcggcagccatatgaaccatgaccaggaatttgaccccccaaaggtttacccacctgtgccagctgagaagaggaagcccatccgcgtgctgtctctctttgatgggattgctacagggctcctggtgctgaaggacctgggcatccaagtggaccgctacattgcctccgaggtgtgtgaggactccatcacggtgggcatggtgcggcaccagggaaagatcatgtacgtcggggacgtccgcagcgtcacacagaagcatatccaggagtggggcccattcgacctggtgattggaggcagtccctgcaatgacctctccattgtcaaccctgcccgcaagggactttatgagggtactggccgcctcttctttgagttctaccgcctcctgcatgatgcgcggcccaaggagggagatgatcgccccttcttctggctctttgagaatgtggtggccatgggcgttagtgacaagagggacatctcgcgatttcttgagtctaaccccgtgatgattgacgccaaagaagtgtctgctgcacacagggcccgttacttctggggtaaccttcctggcatgaacaggcctttggcatccactgtgaatgataagctggagctgcaagagtgtctggagcacggcagaatagccaagttcagcaaagtgaggaccattaccaccaggtcaaactctataaagcagggcaaagaccagcatttccccgtcttcatgaacgagaaggaggacatcctgtggtgcactgaaatggaaagggtgtttggcttccccgtccactacacagacgtctccaacatgagccgcttggcgaggcagagactgctgggccgatcgtggagcgtgccggtcatccgccacctcttcgctccgctgaaggaatattttgcttgtgtggacggcagcggcagcgagacccccggtaccagcgagagcgccacccccgagagccggacactggtgaccttcaaggatgtatttgtggacttcaccagggaggagtggaagctgctggacactgctcagcagatcgtgtacagaaatgtgatgctggagaactataagaacctggtttccttgggttatcagcttactaagccagatgtgatcctccggttggagaagggagaagagcccggcagcggcagcgagacccccggtaccagcgagagcgccacccccgagagccggacactggtgaccttcaaggatgtatttgtggacttcaccagggaggagtggaagctgctggacactgctcagcagatcgtgtacagaaatgtgatgctggagaactataagaacctggtttccttgggttatcagcttactaagccagatgtgatcctccggttggagaagggagaagagcccggcagcggcagcgagacccccggtaccagcgagagcgccacccccgagagccggacactggtgaccttcaaggatgtatttgtggacttcaccagggaggagtggaagctgctggacactgctcagcagatcgtgtacagaaatgtgatgctggagaactataagaacctggtttccttgggttatcagcttactaagccagatgtgatcctccggttggagaagggagaagagccctga

SEQ ID NO: 237 - DNA, 6819 bp, synthetic construct
  misc_feature 1..6819: note = V52 CDS
  source 1..6819: mol_type = other DNA
atggtccctgctgctaagagagtgaaactggatggatccgacaagaagtacagcatcggcctggccatcggcaccaactctgtgggctgggccgtgatcaccgacgagtacaaggtgcccagcaagaaattcaaggtgctgggcaacaccgaccggcacagcatcaagaagaacctgatcggcgccctgctgttcgacagcggagaaacagccgaggccacccggctgaagagaaccgccagaagaagatacaccagacggaagaaccggatctgctatctgcaagagatcttcagcaacgagatggccaaggtggacgacagcttcttccacagactggaagagtccttcctggtggaagaggataagaagcacgagcggcaccccatcttcggcaacatcgtggacgaggtggcctaccacgagaagtaccccaccatctaccacctgagaaagaaactggtggacagcaccgacaaggccgacctgcggctgatctatctggccctggcccacatgatcaagttccggggccacttcctgatcgagggcgacctgaaccccgacaacagcgacgtggacaagctgttcatccagctggtgcagacctacaaccagctgttcgaggaaaaccccatcaacgccagcggcgtggacgccaaggccatcctgtctgccagactgagcaagagcagacggctggaaaatctgatcgcccagctgcccggcgagaagaagaatggcctgttcggcaacctgattgccctgagcctgggcctgacccccaacttcaagagcaacttcgacctggccgaggatgccaaactgcagctgagcaaggacacctacgacgacgacctggacaacctgctggcccagatcggcgaccagtacgccgacctgtttctggccgccaagaacctgtccgacgccatcctgctgagcgacatcctgagagtgaacaccgagatcaccaaggcccccctgagcgcctctatgatcaagagatacgacgagcaccaccaggacctgaccctgctgaaagctctcgtgcggcagcagctgcctgagaagtacaaagagattttcttcgaccagagcaagaacggctacgccggctacatcgatggcggagccagccaggaagagttctacaagttcatcaagcccatcctggaaaagatggacggcaccgaggaactgctcgtgaagctgaacagagaggacctgctgcggaagcagcggaccttcgacaacggcagcatcccccaccagatccacctgggagagctgcacgccattctgcggcggcaggaagatttttacccattcctgaaggacaaccgggaaaagatcgagaagatcctgaccttccgcatcccctactacgtgggccctctggccaggggaaacagcagattcgcctggatgaccagaaagagcgaggaaaccatcaccccctggaacttcgaggaagtggtggacaagggcgccagcgcccagagcttcatcgagcggatgaccaacttcgataagaacctgcccaacgagaaggtgctgcccaagcacagcctgctgtacgagtacttcaccgtgtacaacgagctgaccaaagtgaaatacgtgaccgagggaatgagaaagcccgccttcctgagcggcgagcagaaaaaagccatcgtggacctgctgttcaagaccaaccggaaagtgaccgtgaagcagctgaaagaggactacttcaagaaaatcgagtgcttcgactccgtggaaatctccggcgtggaagatcggttcaacgcctccctgggcacataccacgatctgctgaaaattatcaaggacaaggacttcctggacaatgaggaaaacgaggacattctggaagatatcgtgctgaccctgacactgtttgaggacagagagatgatcgaggaacggctgaaaacctatgcccacctgttcgacgacaaagtgatgaagcagctgaagcggcggagatacaccggctggggcaggctgagccggaagctgatcaacggcatccgggacaagcagtccggcaagacaatcctggatttcctgaagtccgacggcttcgccaacagaaacttcatgcagctgatccacgacgacagcctgacctttaaagaggacatccagaaagcccaggtgtccggccagggcgatagcctgcacgagcacattgccaatctggccggcagccccgccattaagaagggcatcctgcagacagtgaaggtggtggacgagctcgtgaaagtgatgggccggcacaagcccgagaacatcgtgatcgaaatggccagagagaaccagaccacccagaagggacagaagaacagccgcgagagaatgaagcggatcgaagagggcatcaaagagctgggcagccagatcctgaaagaacaccccgtggaaaacacccagctgcagaacgagaagctgtacctgtactacctgcagaatgggcgggatatgtacgtggaccaggaactggacatcaaccggctgtccgactacgatgtggacgctatcgtgcctcagagctttctgaaggacgactccatcgataacaaagtgctgactcggagcgacaagaaccggggcaagagcgacaacgtgccctccgaagaggtcgtgaagaagatgaagaactactggcgccagctgctgaatgccaagctgattacccagaggaagttcgacaatctgaccaaggccgagagaggcggcctgagcgaactggataaggccggcttcatcaagagacagctggtggaaacccggcagatcacaaagcacgtggcacagatcctggactcccggatgaacactaagtacgacgagaacgacaaactgatccgggaagtgaaagtgatcaccctgaagtccaagctggtgtccgatttccggaaggatttccagttttacaaagtgcgcgagatcaacaactaccaccacgcccacgacgcctacctgaacgccgtcgtgggaaccgccctgatcaaaaagtaccctaagctggaaagcgagttcgtgtacggcgactacaaggtgtacgacgtgcggaagatgatcgccaagagcgagcaggaaatcggcaaggctaccgccaagtacttcttctacagcaacatcatgaactttttcaagaccgagattaccctggccaacggcgagatccggaagcggcctctgatcgagacaaacggcgaaacaggcgagatcgtgtgggataagggccgggactttgccaccgtgcggaaagtgctgtctatgccccaagtgaatatcgtgaaaaagaccgaggtgcagacaggcggcttcagcaaagagtctatcctgcccaagaggaacagcgacaagctgatcgccagaaagaaggactgggaccctaagaagtacggcggcttcgacagccccaccgtggcctattctgtgctggtggtggccaaagtggaaaagggcaagtccaagaaactgaagagtgtgaaagagctgctggggatcaccatcatggaaagaagcagcttcgagaagaatcccatcgactttctggaagccaagggctacaaagaagtgaaaaaggacctgatcatcaagctgcctaagtactccctgttcgagctggaaaacggccggaagagaatgctggcctctgccggcgaactgcagaagggaaacgaactggccctgccctccaaatatgtgaacttcctgtacctggccagccactatgagaagctgaagggctcccccgaggataatgagcagaaacagctgtttgtggaacagcacaaacactacctggacgagatcatcgagcagatcagcgagttctccaagagagtgatcctggccgacgctaatctggacaaggtgctgagcgcctacaacaagcacagagacaagcctatcagagagcaggccgagaatatcatccacctgtttaccctgaccaatctgggagcccctgccgccttcaagtactttgacaccaccatcgaccggaagaggtacaccagcaccaaagaggtgctggacgccaccctgatccaccagagcatcaccggcctgtacgagacacggatcgacctgtctcagctgggaggcgacgcctatccctatgacgtgcccgattatgccagcctgggcagcggctcccccaagaaaaaacgcaaggtggaagatcctaagaaaaagcggaaagtggacggcggagggccgagctctggcgcacccccaccaagtggagggtctcctgccgggtccccaacatctactgaagaaggcaccagcgaatccgcaacgcccgagtcaggccctggtacctccacagaaccatctgaaggtagtgcgcctggttccccagctggaagccctacttccaccgaagaaggcacgtcaaccgaaccaagtgaaggatctgcccctgggaccagcactgaaccatctgagcggacactggtgaccttcaaggatgtatttgtggacttcaccagggaggagtggaagctgctggacactgctcagcagatcgtgtacagaaatgtgatgctggagaactataagaacctggtttccttgggttatcagcttactaagccagatgtgatcctccggttggagaagggagaagagcccagcggcagcgagacccccggtaccagcgagagcgctacacccgaatccggccccggcagccccgccggcagccctacaagcaccgaggagggcacctccgaatccgccacccctgagagcggacccggcagcgagcctgccacaagcggcagcgagacacctggaacaagcgagagcgccacacctgaaagcggccccggaacatccaccgagcctagcgagggcagcgcccctggcacaagcacagagccttccgagagcgccacccccgagagcatgggccctatggagatatacaagacagtgtctgcatggaagagacagccagtgcgggtactgagcctcttcagaaacatcgacaaggtactaaagagtttgggcttcttggaaagcggttctggttctgggggaggaacgctgaagtacgtggaagatgtcacaaatgtcgtgaggagagacgtggagaaatggggcccctttgacctggtgtacggctcgacgcagcccctaggcagctcttgtgatcgctgtcccggctggtacatgttccagttccaccggatcctgcagtatgcgctgcctcgccaggagagtcagcggcccttcttctggatattcatggacaatctgctgctgactgaggatgaccaagagacaactacccgcttccttcagacagaggctgtgaccctccaggatgtccgtggcagagactaccagaatgctatgcgggtgtggagcaacattccagggctgaagagcaagcatgcgcccctgaccccaaaggaagaagagtatctgcaagcccaagtcagaagcaggagcaagctggacgccccgaaagttgacctcctggtgaagaactgccttctcccgctgagagagtacttcaagtatttttctcaaaactcacttcctctttctagcggcaatagtaacgctaacagccgcgggccgagcttcagcagcggcctggtgccgttaagcttgcgcggcagccatatgaaccatgaccaggaatttgaccccccaaaggtttacccacctgtgccagctgagaagaggaagcccatccgcgtgctgtctctctttgatgggattgctacagggctcctggtgctgaaggacctgggcatccaagtggaccgctacattgcctccgaggtgtgtgaggactccatcacggtgggcatggtgcggcaccagggaaagatcatgtacgtcggggacgtccgcagcgtcacacagaagcatatccaggagtggggcccattcgacctggtgattggaggcagtccctgcaatgacctctccattgtcaaccctgcccgcaagggactttatgagggtactggccgcctcttctttgagttctaccgcctcctgcatgatgcgcggcccaaggagggagatgatcgccccttcttctggctctttgagaatgtggtggccatgggcgttagtgacaagagggacatctcgcgatttcttgagtctaaccccgtgatgattgacgccaaagaagtgtctgctgcacacagggcccgttacttctggggtaaccttcctggcatgaacaggcctttggcatccactgtgaatgataagctggagctgcaagagtgtctggagcacggcagaatagccaagttcagcaaagtgaggaccattaccaccaggtcaaactctataaagcagggcaaagaccagcatttccccgtcttcatgaacgagaaggaggacatcctgtggtgcactgaaatggaaagggtgtttggcttccccgtccactacacagacgtctccaacatgagccgcttggcgaggcagagactgctgggccgatcgtggagcgtgccggtcatccgccacctcttcgctccgctgaaggaatattttgcttgtgtggacggcagcggcagcgagacccccggtaccagcgagagcgccacccccgagagccggacactggtgaccttcaaggatgtatttgtggacttcaccagggaggagtggaagctgctggacactgctcagcagatcgtgtacagaaatgtgatgctggagaactataagaacctggtttccttgggttatcagcttactaagccagatgtgatcctccggttggagaagggagaagagccctga

SEQ ID NO: 238 - DNA, 6933 bp, synthetic construct
  misc_feature 1..6933: note = V53 CDS
  source 1..6933: mol_type = other DNA
atggtccctgctgctaagagagtgaaactggatggatccgacaagaagtacagcatcggcctggccatcggcaccaactctgtgggctgggccgtgatcaccgacgagtacaaggtgcccagcaagaaattcaaggtgctgggcaacaccgaccggcacagcatcaagaagaacctgatcggcgccctgctgttcgacagcggagaaacagccgaggccacccggctgaagagaaccgccagaagaagatacaccagacggaagaaccggatctgctatctgcaagagatcttcagcaacgagatggccaaggtggacgacagcttcttccacagactggaagagtccttcctggtggaagaggataagaagcacgagcggcaccccatcttcggcaacatcgtggacgaggtggcctaccacgagaagtaccccaccatctaccacctgagaaagaaactggtggacagcaccgacaaggccgacctgcggctgatctatctggccctggcccacatgatcaagttccggggccacttcctgatcgagggcgacctgaaccccgacaacagcgacgtggacaagctgttcatccagctggtgcagacctacaaccagctgttcgaggaaaaccccatcaacgccagcggcgtggacgccaaggccatcctgtctgccagactgagcaagagcagacggctggaaaatctgatcgcccagctgcccggcgagaagaagaatggcctgttcggcaacctgattgccctgagcctgggcctgacccccaacttcaagagcaacttcgacctggccgaggatgccaaactgcagctgagcaaggacacctacgacgacgacctggacaacctgctggcccagatcggcgaccagtacgccgacctgtttctggccgccaagaacctgtccgacgccatcctgctgagcgacatcctgagagtgaacaccgagatcaccaaggcccccctgagcgcctctatgatcaagagatacgacgagcaccaccaggacctgaccctgctgaaagctctcgtgcggcagcagctgcctgagaagtacaaagagattttcttcgaccagagcaagaacggctacgccggctacatcgatggcggagccagccaggaagagttctacaagttcatcaagcccatcctggaaaagatggacggcaccgaggaactgctcgtgaagctgaacagagaggacctgctgcggaagcagcggaccttcgacaacggcagcatcccccaccagatccacctgggagagctgcacgccattctgcggcggcaggaagatttttacccattcctgaaggacaaccgggaaaagatcgagaagatcctgaccttccgcatcccctactacgtgggccctctggccaggggaaacagcagattcgcctggatgaccagaaagagcgaggaaaccatcaccccctggaacttcgaggaagtggtggacaagggcgccagcgcccagagcttcatcgagcggatgaccaacttcgataagaacctgcccaacgagaaggtgctgcccaagcacagcctgctgtacgagtacttcaccgtgtacaacgagctgaccaaagtgaaatacgtgaccgagggaatgagaaagcccgccttcctgagcggcgagcagaaaaaagccatcgtggacctgctgttcaagaccaaccggaaagtgaccgtgaagcagctgaaagaggactacttcaagaaaatcgagtgcttcgactccgtggaaatctccggcgtggaagatcggttcaacgcctccctgggcacataccacgatctgctgaaaattatcaaggacaaggacttcctggacaatgaggaaaacgaggacattctggaagatatcgtgctgaccctgacactgtttgaggacagagagatgatcgaggaacggctgaaaacctatgcccacctgttcgacgacaaagtgatgaagcagctgaagcggcggagatacaccggctggggcaggctgagccggaagctgatcaacggcatccgggacaagcagtccggcaagacaatcctggatttcctgaagtccgacggcttcgccaacagaaacttcatgcagctgatccacgacgacagcctgacctttaaagaggacatccagaaagcccaggtgtccggccagggcgatagcctgcacgagcacattgccaatctggccggcagccccgccattaagaagggcatcctgcagacagtgaaggtggtggacgagctcgtgaaagtgatgggccggcacaagcccgagaacatcgtgatcgaaatggccagagagaaccagaccacccagaagggacagaagaacagccgcgagagaatgaagcggatcgaagagggcatcaaagagctgggcagccagatcctgaaagaacaccccgtggaaaacacccagctgcagaacgagaagctgtacctgtactacctgcagaatgggcgggatatgtacgtggaccaggaactggacatcaaccggctgtccgactacgatgtggacgctatcgtgcctcagagctttctgaaggacgactccatcgataacaaagtgctgactcggagcgacaagaaccggggcaagagcgacaacgtgccctccgaagaggtcgtgaagaagatgaagaactactggcgccagctgctgaatgccaagctgattacccagaggaagttcgacaatctgaccaaggccgagagaggcggcctgagcgaactggataaggccggcttcatcaagagacagctggtggaaacccggcagatcacaaagcacgtggcacagatcctggactcccggatgaacactaagtacgacgagaacgacaaactgatccgggaagtgaaagtgatcaccctgaagtccaagctggtgtccgatttccggaaggatttccagttttacaaagtgcgcgagatcaacaactaccaccacgcccacgacgcctacctgaacgccgtcgtgggaaccgccctgatcaaaaagtaccctaagctggaaagcgagttcgtgtacggcgactacaaggtgtacgacgtgcggaagatgatcgccaagagcgagcaggaaatcggcaaggctaccgccaagtacttcttctacagcaacatcatgaactttttcaagaccgagattaccctggccaacggcgagatccggaagcggcctctgatcgagacaaacggcgaaacaggcgagatcgtgtgggataagggccgggactttgccaccgtgcggaaagtgctgtctatgccccaagtgaatatcgtgaaaaagaccgaggtgcagacaggcggcttcagcaaagagtctatcctgcccaagaggaacagcgacaagctgatcgccagaaagaaggactgggaccctaagaagtacggcggcttcgacagccccaccgtggcctattctgtgctggtggtggccaaagtggaaaagggcaagtccaagaaactgaagagtgtgaaagagctgctggggatcaccatcatggaaagaagcagcttcgagaagaatcccatcgactttctggaagccaagggctacaaagaagtgaaaaaggacctgatcatcaagctgcctaagtactccctgttcgagctggaaaacggccggaagagaatgctggcctctgccggcgaactgcagaagggaaacgaactggccctgccctccaaatatgtgaacttcctgtacctggccagccactatgagaagctgaagggctcccccgaggataatgagcagaaacagctgtttgtggaacagcacaaacactacctggacgagatcatcgagcagatcagcgagttctccaagagagtgatcctggccgacgctaatctggacaaggtgctgagcgcctacaacaagcacagagacaagcctatcagagagcaggccgagaatatcatccacctgtttaccctgaccaatctgggagcccctgccgccttcaagtactttgacaccaccatcgaccggaagaggtacaccagcaccaaagaggtgctggacgccaccctgatccaccagagcatcaccggcctgtacgagacacggatcgacctgtctcagctgggaggcgacgcctatccctatgacgtgcccgattatgccagcctgggcagcggctcccccaagaaaaaacgcaaggtggaagatcctaagaaaaagcggaaagtggacggcggagggccgagctctggcgcacccccaccaagtggagggtctcctgccgggtccccaacatctactgaagaaggcaccagcgaatccgcaacgcccgagtcaggccctggtacctccacagaaccatctgaaggtagtgcgcctggttccccagctggaagccctacttccaccgaagaaggcacgtcaaccgaaccaagtgaaggatctgcccctgggaccagcactgaaccatctgagatgaacaattcccagggaagagtgaccttcgaggacgtgaccgtgaacttcacccaaggcgagtggcagagactgaaccccgagcagagaaacctgtaccgggacgtgatgctggaaaactacagcaacctggtgtccgtcggccagggcgagacaacaaagcctgacgtgatcctgcggctggaacagggcaaagagccttggctggaagaggaagaggtgctcggatctggcagagccgagaagaatggcgatatcggcggacagatctggaagccaaaggatgtgaaagagagtctcagcggcagcgagacccccggtaccagcgagagcgctacacccgaatccggccccggcagccccgccggcagccctacaagcaccgaggagggcacctccgaatccgccacccctgagagcggacccggcagcgagcctgccacaagcggcagcgagacacctggaacaagcgagagcgccacacctgaaagcggccccggaacatccaccgagcctagcgagggcagcgcccctggcacaagcacagagccttccgagagcgccacccccgagagcatgggccctatggagatatacaagacagtgtctgcatggaagagacagccagtgcgggtactgagcctcttcagaaacatcgacaaggtactaaagagtttgggcttcttggaaagcggttctggttctgggggaggaacgctgaagtacgtggaagatgtcacaaatgtcgtgaggagagacgtggagaaatggggcccctttgacctggtgtacggctcgacgcagcccctaggcagctcttgtgatcgctgtcccggctggtacatgttccagttccaccggatcctgcagtatgcgctgcctcgccaggagagtcagcggcccttcttctggatattcatggacaatctgctgctgactgaggatgaccaagagacaactacccgcttccttcagacagaggctgtgaccctccaggatgtccgtggcagagactaccagaatgctatgcgggtgtggagcaacattccagggctgaagagcaagcatgcgcccctgaccccaaaggaagaagagtatctgcaagcccaagtcagaagcaggagcaagctggacgccccgaaagttgacctcctggtgaagaactgccttctcccgctgagagagtacttcaagtatttttctcaaaactcacttcctctttctagcggcaatagtaacgctaacagccgcgggccgagcttcagcagcggcctggtgccgttaagcttgcgcggcagccatatgaaccatgaccaggaatttgaccccccaaaggtttacccacctgtgccagctgagaagaggaagcccatccgcgtgctgtctctctttgatgggattgctacagggctcctggtgctgaaggacctgggcatccaagtggaccgctacattgcctccgaggtgtgtgaggactccatcacggtgggcatggtgcggcaccagggaaagatcatgtacgtcggggacgtccgcagcgtcacacagaagcatatccaggagtggggcccattcgacctggtgattggaggcagtccctgcaatgacctctccattgtcaaccctgcccgcaagggactttatgagggtactggccgcctcttctttgagttctaccgcctcctgcatgatgcgcggcccaaggagggagatgatcgccccttcttctggctctttgagaatgtggtggccatgggcgttagtgacaagagggacatctcgcgatttcttgagtctaaccccgtgatgattgacgccaaagaagtgtctgctgcacacagggcccgttacttctggggtaaccttcctggcatgaacaggcctttggcatccactgtgaatgataagctggagctgcaagagtgtctggagcacggcagaatagccaagttcagcaaagtgaggaccattaccaccaggtcaaactctataaagcagggcaaagaccagcatttccccgtcttcatgaacgagaaggaggacatcctgtggtgcactgaaatggaaagggtgtttggcttccccgtccactacacagacgtctccaacatgagccgcttggcgaggcagagactgctgggccgatcgtggagcgtgccggtcatccgccacctcttcgctccgctgaaggaatattttgcttgtgtggacggcagcggcagcgagacccccggtaccagcgagagcgccacccccgagagccggacactggtgaccttcaaggatgtatttgtggacttcaccagggaggagtggaagctgctggacactgctcagcagatcgtgtacagaaatgtgatgctggagaactataagaacctggtttccttgggttatcagcttactaagccagatgtgatcctccggttggagaagggagaagagccctga

SEQ ID NO: 239 - DNA, 6882 bp, synthetic construct
  misc_feature 1..6882: note = V54 CDS
  source 1..6882: mol_type = other DNA
atggtgcggacactggtgaccttcaaggatgtatttgtggacttcaccagggaggagtggaagctgctggacactgctcagcagatcgtgtacagaaatgtgatgctggagaactataagaacctggtttccttgggttatcagcttactaagccagatgtgatcctccggttggagaagggagaagagcccggagggccgagctctggcgcacccccaccaagtggagggtctcctgccgggtccccaacatctactgaagaaggcaccagcgaatccgcaacgcccgagtcaggccctggtacctccacagaaccatctgaaggtagtgcgcctggttccccagctggaagccctacttccaccgaagaaggcacgtcaaccgaaccaagtgaaggatctgcccctgggaccagcactgaaccatctgagccaaaaaagaagagaaaggtaatgaaccatgaccaggaatttgaccccccaaaggtttacccacctgtgccagctgagaagaggaagcccatccgcgtgctgtctctctttgatgggattgctacagggctcctggtgctgaaggacctgggcatccaagtggaccgctacattgcctccgaggtgtgtgaggactccatcacggtgggcatggtgcggcaccagggaaagatcatgtacgtcggggacgtccgcagcgtcacacagaagcatatccaggagtggggcccattcgacctggtgattggaggcagtccctgcaatgacctctccattgtcaaccctgcccgcaagggactttatgagggtactggccgcctcttctttgagttctaccgcctcctgcatgatgcgcggcccaaggagggagatgatcgccccttcttctggctctttgagaatgtggtggccatgggcgttagtgacaagagggacatctcgcgatttcttgagtctaaccccgtgatgattgacgccaaagaagtgtctgctgcacacagggcccgttacttctggggtaaccttcctggcatgaacaggcctttggcatccactgtgaatgataagctggagctgcaagagtgtctggagcacggcagaatagccaagttcagcaaagtgaggaccattaccaccaggtcaaactctataaagcagggcaaagaccagcatttccccgtcttcatgaacgagaaggaggacatcctgtggtgcactgaaatggaaagggtgtttggcttccccgtccactacacagacgtctccaacatgagccgcttggcgaggcagagactgctgggccgatcgtggagcgtgccggtcatccgccacctcttcgctccgctgaaggaatattttgcttgtgtgtctagcggcaatagtaacgctaacagccgcgggccgagcttcagcagcggcctggtgccgttaagcttgcgcggcagccatatgttcgaaaccgtgcctgtgtggaggagacagccagtccgggtgctgtccctttttgaagacatcaagaaagagctgacgagtttgggctttttggaaagtggttctgacccgggacaactgaagcatgtggttgatgtcacagacacagtgaggaaggatgtggaggagtggggacccttcgatcttgtgtacggcgccacacctcccctgggccacacctgtgaccgtcctcccagctggtacctgttccagttccaccggctcctgcagtacgcacggcccaagccaggcagccccaggcccttcttctggatgttcgtggacaatctggtgctgaacaaggaagacctggacgtcgcatctcgcttcctggagatggagccagtcaccatcccagatgtccacggcggatccttgcagaatgctgtccgcgtgtggagcaacatcccagccataaggagcagcaggcactgggctctggtttcggaagaagaattgtccctgctggcccagaacaagcagagctcgaagctcgcggccaagtggcccaccaagctggtgaagaactgctttctccccctaagagaatatttcaagtatttttcagacggcagcggcagcgagacccccggtaccagcgagagcgccacccccgagagcatgaacaattcccagggaagagtgaccttcgaggatgtcactgtgaacttcacccagggggagtggcagcggctgaatcccgaacagagaaacttgtacagggatgtgatgctggagaattacagcaaccttgtctctgtgggacaaggggaaaccaccaaacccgatgtgatcttgaggttggaacaaggaaaggagccatggttggaggaagaggaagtgctgggaagtggccgtgcagaaaaaaatggggacattggagggcagatttggaagccaaaggatgtgaaagagagtctcggagggccgagctctggcgcacccccaccaagtggagggtctcctgccgggtccccaacatctactgaagaaggcaccagcgaatccgcaacgcccgagtcaggccctggtacctccacagaaccatctgaaggtagtgcgcctggttccccagctggaagccctacttccaccgaagaaggcacgtcaaccgaaccaagtgaaggatctgcccctgggaccagcactgaaccatctgagccaaaaaagaagagaaaggtaatggacaagaagtacagcatcggcctggccatcggcaccaactctgtgggctgggccgtgatcaccgacgagtacaaggtgcccagcaagaaattcaaggtgctgggcaacaccgaccggcacagcatcaagaagaacctgatcggcgccctgctgttcgacagcggagaaacagccgaggccacccggctgaagagaaccgccagaagaagatacaccagacggaagaaccggatctgctatctgcaagagatcttcagcaacgagatggccaaggtggacgacagcttcttccacagactggaagagtccttcctggtggaagaggataagaagcacgagcggcaccccatcttcggcaacatcgtggacgaggtggcctaccacgagaagtaccccaccatctaccacctgagaaagaaactggtggacagcaccgacaaggccgacctgcggctgatctatctggccctggcccacatgatcaagttccggggccacttcctgatcgagggcgacctgaaccccgacaacagcgacgtggacaagctgttcatccagctggtgcagacctacaaccagctgttcgaggaaaaccccatcaacgccagcggcgtggacgccaaggccatcctgtctgccagactgagcaagagcagacggctggaaaatctgatcgcccagctgcccggcgagaagaagaatggcctgttcggcaacctgattgccctgagcctgggcctgacccccaacttcaagagcaacttcgacctggccgaggatgccaaactgcagctgagcaaggacacctacgacgacgacctggacaacctgctggcccagatcggcgaccagtacgccgacctgtttctggccgccaagaacctgtccgacgccatcctgctgagcgacatcctgagagtgaacaccgagatcaccaaggcccccctgagcgcctctatgatcaagagatacgacgagcaccaccaggacctgaccctgctgaaagctctcgtgcggcagcagctgcctgagaagtacaaagagattttcttcgaccagagcaagaacggctacgccggctacatcgatggcggagccagccaggaagagttctacaagttcatcaagcccatcctggaaaagatggacggcaccgaggaactgctcgtgaagctgaacagagaggacctgctgcggaagcagcggaccttcgacaacggcagcatcccccaccagatccacctgggagagctgcacgccattctgcggcggcaggaagatttttacccattcctgaaggacaaccgggaaaagatcgagaagatcctgaccttccgcatcccctactacgtgggccctctggccaggggaaacagcagattcgcctggatgaccagaaagagcgaggaaaccatcaccccctggaacttcgaggaagtggtggacaagggcgccagcgcccagagcttcatcgagcggatgaccaacttcgataagaacctgcccaacgagaaggtgctgcccaagcacagcctgctgtacgagtacttcaccgtgtacaacgagctgaccaaagtgaaatacgtgaccgagggaatgagaaagcccgccttcctgagcggcgagcagaaaaaagccatcgtggacctgctgttcaagaccaaccggaaagtgaccgtgaagcagctgaaagaggactacttcaagaaaatcgagtgcttcgactccgtggaaatctccggcgtggaagatcggttcaacgcctccctgggcacataccacgatctgctgaaaattatcaaggacaaggacttcctggacaatgaggaaaacgaggacattctggaagatatcgtgctgaccctgacactgtttgaggacagagagatgatcgaggaacggctgaaaacctatgcccacctgttcgacgacaaagtgatgaagcagctgaagcggcggagatacaccggctggggcaggctgagccggaagctgatcaacggcatccgggacaagcagtccggcaagacaatcctggatttcctgaagtccgacggcttcgccaacagaaacttcatgcagctgatccacgacgacagcctgacctttaaagaggacatccagaaagcccaggtgtccggccagggcgatagcctgcacgagcacattgccaatctggccggcagccccgccattaagaagggcatcctgcagacagtgaaggtggtggacgagctcgtgaaagtgatgggccggcacaagcccgagaacatcgtgatcgaaatggccagagagaaccagaccacccagaagggacagaagaacagccgcgagagaatgaagcggatcgaagagggcatcaaagagctgggcagccagatcctgaaagaacaccccgtggaaaacacccagctgcagaacgagaagctgtacctgtactacctgcagaatgggcgggatatgtacgtggaccaggaactggacatcaaccggctgtccgactacgatgtggacgctatcgtgcctcagagctttctgaaggacgactccatcgataacaaagtgctgactcggagcgacaagaaccggggcaagagcgacaacgtgccctccgaagaggtcgtgaagaagatgaagaactactggcgccagctgctgaatgccaagctgattacccagaggaagttcgacaatctgaccaaggccgagagaggcggcctgagcgaactggataaggccggcttcatcaagagacagctggtggaaacccggcagatcacaaagcacgtggcacagatcctggactcccggatgaacactaagtacgacgagaacgacaaactgatccgggaagtgaaagtgatcaccctgaagtccaagctggtgtccgatttccggaaggatttccagttttacaaagtgcgcgagatcaacaactaccaccacgcccacgacgcctacctgaacgccgtcgtgggaaccgccctgatcaaaaagtaccctaagctggaaagcgagttcgtgtacggcgactacaaggtgtacgacgtgcggaagatgatcgccaagagcgagcaggaaatcggcaaggctaccgccaagtacttcttctacagcaacatcatgaactttttcaagaccgagattaccctggccaacggcgagatccggaagcggcctctgatcgagacaaacggcgaaacaggcgagatcgtgtgggataagggccgggactttgccaccgtgcggaaagtgctgtctatgccccaagtgaatatcgtgaaaaagaccgaggtgcagacaggcggcttcagcaaagagtctatcctgcccaagaggaacagcgacaagctgatcgccagaaagaaggactgggaccctaagaagtacggcggcttcgacagccccaccgtggcctattctgtgctggtggtggccaaagtggaaaagggcaagtccaagaaactgaagagtgtgaaagagctgctggggatcaccatcatggaaagaagcagcttcgagaagaatcccatcgactttctggaagccaagggctacaaagaagtgaaaaaggacctgatcatcaagctgcctaagtactccctgttcgagctggaaaacggccggaagagaatgctggcctctgccggcgaactgcagaagggaaacgaactggccctgccctccaaatatgtgaacttcctgtacctggccagccactatgagaagctgaagggctcccccgaggataatgagcagaaacagctgtttgtggaacagcacaaacactacctggacgagatcatcgagcagatcagcgagttctccaagagagtgatcctggccgacgctaatctggacaaggtgctgagcgcctacaacaagcacagagacaagcctatcagagagcaggccgagaatatcatccacctgtttaccctgaccaatctgggagcccctgccgccttcaagtactttgacaccaccatcgaccggaagaggtacaccagcaccaaagaggtgctggacgccaccctgatccaccagagcatcaccggcctgtacgagacacggatcgacctgtctcagctgggaggcgacgcctatccctatgacgtgcccgattatgccagcctgggcagcggctcccccaagaaaaaacgcaaggtggaagatcctaagaaaaagcggaaagtggacggcctcgagtaatga

SEQ ID NO: 240 - DNA, 6873 bp, synthetic construct
  misc_feature 1..6873: note = V55 CDS
  source 1..6873: mol_type = other DNA
atggtgcggacactggtgaccttcaaggatgtatttgtggacttcaccagggaggagtggaagctgctggacactgctcagcagatcgtgtacagaaatgtgatgctggagaactataagaacctggtttccttgggttatcagcttactaagccagatgtgatcctccggttggagaagggagaagagcccggagggccgagctctggcgcacccccaccaagtggagggtctcctgccgggtccccaacatctactgaagaaggcaccagcgaatccgcaacgcccgagtcaggccctggtacctccacagaaccatctgaaggtagtgcgcctggttccccagctggaagccctacttccaccgaagaaggcacgtcaaccgaaccaagtgaaggatctgcccctgggaccagcactgaaccatctgagccaaaaaagaagagaaaggtaaacaattcccagggaagagtgaccttcgaggatgtcactgtgaacttcacccagggggagtggcagcggctgaatcccgaacagagaaacttgtacagggatgtgatgctggagaattacagcaaccttgtctctgtgggacaaggggaaaccaccaaacccgatgtgatcttgaggttggaacaaggaaaggagccatggttggaggaagaggaagtgctgggaagtggccgtgcagaaaaaaatggggacattggagggcagatttggaagccaaaggatgtgaaagagagtctcagcggcagcgagacccccggtaccagcgagagcgccacccccgagagcatgaaccatgaccaggaatttgaccccccaaaggtttacccacctgtgccagctgagaagaggaagcccatccgcgtgctgtctctctttgatgggattgctacagggctcctggtgctgaaggacctgggcatccaagtggaccgctacattgcctccgaggtgtgtgaggactccatcacggtgggcatggtgcggcaccagggaaagatcatgtacgtcggggacgtccgcagcgtcacacagaagcatatccaggagtggggcccattcgacctggtgattggaggcagtccctgcaatgacctctccattgtcaaccctgcccgcaagggactttatgagggtactggccgcctcttctttgagttctaccgcctcctgcatgatgcgcggcccaaggagggagatgatcgccccttcttctggctctttgagaatgtggtggccatgggcgttagtgacaagagggacatctcgcgatttcttgagtctaaccccgtgatgattgacgccaaagaagtgtctgctgcacacagggcccgttacttctggggtaaccttcctggcatgaacaggcctttggcatccactgtgaatgataagctggagctgcaagagtgtctggagcacggcagaatagccaagttcagcaaagtgaggaccattaccaccaggtcaaactctataaagcagggcaaagaccagcatttccccgtcttcatgaacgagaaggaggacatcctgtggtgcactgaaatggaaagggtgtttggcttccccgtccactacacagacgtctccaacatgagccgcttggcgaggcagagactgctgggccgatcgtggagcgtgccggtcatccgccacctcttcgctccgctgaaggaatattttgcttgtgtgtctagcggcaatagtaacgctaacagccgcgggccgagcttcagcagcggcctggtgccgttaagcttgcgcggcagccatatgttcgaaaccgtgcctgtgtggaggagacagccagtccgggtgctgtccctttttgaagacatcaagaaagagctgacgagtttgggctttttggaaagtggttctgacccgggacaactgaagcatgtggttgatgtcacagacacagtgaggaaggatgtggaggagtggggacccttcgatcttgtgtacggcgccacacctcccctgggccacacctgtgaccgtcctcccagctggtacctgttccagttccaccggctcctgcagtacgcacggcccaagccaggcagccccaggcccttcttctggatgttcgtggacaatctggtgctgaacaaggaagacctggacgtcgcatctcgcttcctggagatggagccagtcaccatcccagatgtccacggcggatccttgcagaatgctgtccgcgtgtggagcaacatcccagccataaggagcagcaggcactgggctctggtttcggaagaagaattgtccctgctggcccagaacaagcagagctcgaagctcgcggccaagtggcccaccaagctggtgaagaactgctttctccccctaagagaatatttcaagtatttttcaggagggccgagctctggcgcacccccaccaagtggagggtctcctgccgggtccccaacatctactgaagaaggcaccagcgaatccgcaacgcccgagtcaggccctggtacctccacagaaccatctgaaggtagtgcgcctggttccccagctggaagccctacttccaccgaagaaggcacgtcaaccgaaccaagtgaaggatctgcccctgggaccagcactgaaccatctgagccaaaaaagaagagaaaggtaatggacaagaagtacagcatcggcctggccatcggcaccaactctgtgggctgggccgtgatcaccgacgagtacaaggtgcccagcaagaaattcaaggtgctgggcaacaccgaccggcacagcatcaagaagaacctgatcggcgccctgctgttcgacagcggagaaacagccgaggccacccggctgaagagaaccgccagaagaagatacaccagacggaagaaccggatctgctatctgcaagagatcttcagcaacgagatggccaaggtggacgacagcttcttccacagactggaagagtccttcctggtggaagaggataagaagcacgagcggcaccccatcttcggcaacatcgtggacgaggtggcctaccacgagaagtaccccaccatctaccacctgagaaagaaactggtggacagcaccgacaaggccgacctgcggctgatctatctggccctggcccacatgatcaagttccggggccacttcctgatcgagggcgacctgaaccccgacaacagcgacgtggacaagctgttcatccagctggtgcagacctacaaccagctgttcgaggaaaaccccatcaacgccagcggcgtggacgccaaggccatcctgtctgccagactgagcaagagcagacggctggaaaatctgatcgcccagctgcccggcgagaagaagaatggcctgttcggcaacctgattgccctgagcctgggcctgacccccaacttcaagagcaacttcgacctggccgaggatgccaaactgcagctgagcaaggacacctacgacgacgacctggacaacctgctggcccagatcggcgaccagtacgccgacctgtttctggccgccaagaacctgtccgacgccatcctgctgagcgacatcctgagagtgaacaccgagatcaccaaggcccccctgagcgcctctatgatcaagagatacgacgagcaccaccaggacctgaccctgctgaaagctctcgtgcggcagcagctgcctgagaagtacaaagagattttcttcgaccagagcaagaacggctacgccggctacatcgatggcggagccagccaggaagagttctacaagttcatcaagcccatcctggaaaagatggacggcaccgaggaactgctcgtgaagctgaacagagaggacctgctgcggaagcagcggaccttcgacaacggcagcatcccccaccagatccacctgggagagctgcacgccattctgcggcggcaggaagatttttacccattcctgaaggacaaccgggaaaagatcgagaagatcctgaccttccgcatcccctactacgtgggccctctggccaggggaaacagcagattcgcctggatgaccagaaagagcgaggaaaccatcaccccctggaacttcgaggaagtggtggacaagggcgccagcgcccagagcttcatcgagcggatgaccaacttcgataagaacctgcccaacgagaaggtgctgcccaagcacagcctgctgtacgagtacttcaccgtgtacaacgagctgaccaaagtgaaatacgtgaccgagggaatgagaaagcccgccttcctgagcggcgagcagaaaaaagccatcgtggacctgctgttcaagaccaaccggaaagtgaccgtgaagcagctgaaagaggactacttcaagaaaatcgagtgcttcgactccgtggaaatctccggcgtggaagatcggttcaacgcctccctgggcacataccacgatctgctgaaaattatcaaggacaaggacttcctggacaatgaggaaaacgaggacattctggaagatatcgtgctgaccctgacactgtttgaggacagagagatgatcgaggaacggctgaaaacctatgcccacctgttcgacgacaaagtgatgaagcagctgaagcggcggagatacaccggctggggcaggctgagccggaagctgatcaacggcatccgggacaagcagtccggcaagacaatcctggatttcctgaagtccgacggcttcgccaacagaaacttcatgcagctgatccacgacgacagcctgacctttaaagaggacatccagaaagcccaggtgtccggccagggcgatagcctgcacgagcacattgccaatctggccggcagccccgccattaagaagggcatcctgcagacagtgaaggtggtggacgagctcgtgaaagtgatgggccggcacaagcccgagaacatcgtgatcgaaatggccagagagaaccagaccacccagaagggacagaagaacagccgcgagagaatgaagcggatcgaagagggcatcaaagagctgggcagccagatcctgaaagaacaccccgtggaaaacacccagctgcagaacgagaagctgtacctgtactacctgcagaatgggcgggatatgtacgtggaccaggaactggacatcaaccggctgtccgactacgatgtggacgctatcgtgcctcagagctttctgaaggacgactccatcgataacaaagtgctgactcggagcgacaagaaccggggcaagagcgacaacgtgccctccgaagaggtcgtgaagaagatgaagaactactggcgccagctgctgaatgccaagctgattacccagaggaagttcgacaatctgaccaaggccgagagaggcggcctgagcgaactggataaggccggcttcatcaagagacagctggtggaaacccggcagatcacaaagcacgtggcacagatcctggactcccggatgaacactaagtacgacgagaacgacaaactgatccgggaagtgaaagtgatcaccctgaagtccaagctggtgtccgatttccggaaggatttccagttttacaaagtgcgcgagatcaacaactaccaccacgcccacgacgcctacctgaacgccgtcgtgggaaccgccctgatcaaaaagtaccctaagctggaaagcgagttcgtgtacggcgactacaaggtgtacgacgtgcggaagatgatcgccaagagcgagcaggaaatcggcaaggctaccgccaagtacttcttctacagcaacatcatgaactttttcaagaccgagattaccctggccaacggcgagatccggaagcggcctctgatcgagacaaacggcgaaacaggcgagatcgtgtgggataagggccgggactttgccaccgtgcggaaagtgctgtctatgccccaagtgaatatcgtgaaaaagaccgaggtgcagacaggcggcttcagcaaagagtctatcctgcccaagaggaacagcgacaagctgatcgccagaaagaaggactgggaccctaagaagtacggcggcttcgacagccccaccgtggcctattctgtgctggtggtggccaaagtggaaaagggcaagtccaagaaactgaagagtgtgaaagagctgctggggatcaccatcatggaaagaagcagcttcgagaagaatcccatcgactttctggaagccaagggctacaaagaagtgaaaaaggacctgatcatcaagctgcctaagtactccctgttcgagctggaaaacggccggaagagaatgctggcctctgccggcgaactgcagaagggaaacgaactggccctgccctccaaatatgtgaacttcctgtacctggccagccactatgagaagctgaagggctcccccgaggataatgagcagaaacagctgtttgtggaacagcacaaacactacctggacgagatcatcgagcagatcagcgagttctccaagagagtgatcctggccgacgctaatctggacaaggtgctgagcgcctacaacaagcacagagacaagcctatcagagagcaggccgagaatatcatccacctgtttaccctgaccaatctgggagcccctgccgccttcaagtactttgacaccaccatcgaccggaagaggtacaccagcaccaaagaggtgctggacgccaccctgatccaccagagcatcaccggcctgtacgagacacggatcgacctgtctcagctgggaggcgacgcctatccctatgacgtgcccgattatgccagcctgggcagcggctcccccaagaaaaaacgcaaggtggaagatcctaagaaaaagcggaaagtggacggcctcgagtaatga

SEQ ID NO: 241 - DNA, 7059 bp, synthetic construct
  misc_feature 1..7059: note = V56 CDS
  source 1..7059: mol_type = other DNA
atgaaccatgaccaggaatttgaccccccaaaggtttacccacctgtgccagctgagaagaggaagcccatccgcgtgctgtctctctttgatgggattgctacagggctcctggtgctgaaggacctgggcatccaagtggaccgctacattgcctccgaggtgtgtgaggactccatcacggtgggcatggtgcggcaccagggaaagatcatgtacgtcggggacgtccgcagcgtcacacagaagcatatccaggagtggggcccattcgacctggtgattggaggcagtccctgcaatgacctctccattgtcaaccctgcccgcaagggactttatgagggtactggccgcctcttctttgagttctaccgcctcctgcatgatgcgcggcccaaggagggagatgatcgccccttcttctggctctttgagaatgtggtggccatgggcgttagtgacaagagggacatctcgcgatttcttgagtctaaccccgtgatgattgacgccaaagaagtgtctgctgcacacagggcccgttacttctggggtaaccttcctggcatgaacaggcctttggcatccactgtgaatgataagctggagctgcaagagtgtctggagcacggcagaatagccaagttcagcaaagtgaggaccattaccaccaggtcaaactctataaagcagggcaaagaccagcatttccccgtcttcatgaacgagaaggaggacatcctgtggtgcactgaaatggaaagggtgtttggcttccccgtccactacacagacgtctccaacatgagccgcttggcgaggcagagactgctgggccgatcgtggagcgtgccggtcatccgccacctcttcgctccgctgaaggaatattttgcttgtgtgtctagcggcaatagtaacgctaacagccgcgggccgagcttcagcagcggcctggtgccgttaagcttgcgcggcagccatatgttcgaaaccgtgcctgtgtggaggagacagccagtccgggtgctgtccctttttgaagacatcaagaaagagctgacgagtttgggctttttggaaagtggttctgacccgggacaactgaagcatgtggttgatgtcacagacacagtgaggaaggatgtggaggagtggggacccttcgatcttgtgtacggcgccacacctcccctgggccacacctgtgaccgtcctcccagctggtacctgttccagttccaccggctcctgcagtacgcacggcccaagccaggcagccccaggcccttcttctggatgttcgtggacaatctggtgctgaacaaggaagacctggacgtcgcatctcgcttcctggagatggagccagtcaccatcccagatgtccacggcggatccttgcagaatgctgtccgcgtgtggagcaacatcccagccataaggagcagcaggcactgggctctggtttcggaagaagaattgtccctgctggcccagaacaagcagagctcgaagctcgcggccaagtggcccaccaagctggtgaagaactgctttctccccctaagagaatatttcaagtatttttcaggagggccgagctctggcgcacccccaccaagtggagggtctcctgccgggtccccaacatctactgaagaaggcaccagcgaatccgcaacgcccgagtcaggccctggtacctccacagaaccatctgaaggtagtgcgcctggttccccagctggaagccctacttccaccgaagaaggcacgtcaaccgaaccaagtgaaggatctgcccctgggaccagcactgaaccatctgagcggacactggtgaccttcaaggatgtatttgtggacttcaccagggaggagtggaagctgctggacactgctcagcagatcgtgtacagaaatgtgatgctggagaactataagaacctggtttccttgggttatcagcttactaagccagatgtgatcctccggttggagaagggagaagagcccggagggccgagctctggcgcacccccaccaagtggagggtctcctgccgggtccccaacatctactgaagaaggcaccagcgaatccgcaacgcccgagtcaggccctggtacctccacagaaccatctgaaggtagtgcgcctggttccccagctggaagccctacttccaccgaagaaggcacgtcaaccgaaccaagtgaaggatctgcccctgggaccagcactgaaccatctgagccaaaaaagaagagaaaggtaaacaattcccagggaagagtgaccttcgaggatgtcactgtgaacttcacccagggggagtggcagcggctgaatcccgaacagagaaacttgtacagggatgtgatgctggagaattacagcaaccttgtctctgtgggacaaggggaaaccaccaaacccgatgtgatcttgaggttggaacaaggaaaggagccatggttggaggaagaggaagtgctgggaagtggccgtgcagaaaaaaatggggacattggagggcagatttggaagccaaaggatgtgaaagagagtctcggagggccgagctctggcgcacccccaccaagtggagggtctcctgccgggtccccaacatctactgaagaaggcaccagcgaatccgcaacgcccgagtcaggccctggtacctccacagaaccatctgaaggtagtgcgcctggttccccagctggaagccctacttccaccgaagaaggcacgtcaaccgaaccaagtgaaggatctgcccctgggaccagcactgaaccatctgagccaaaaaagaagagaaaggtaatggacaagaagtacagcatcggcctggccatcggcaccaactctgtgggctgggccgtgatcaccgacgagtacaaggtgcccagcaagaaattcaaggtgctgggcaacaccgaccggcacagcatcaagaagaacctgatcggcgccctgctgttcgacagcggagaaacagccgaggccacccggctgaagagaaccgccagaagaagatacaccagacggaagaaccggatctgctatctgcaagagatcttcagcaacgagatggccaaggtggacgacagcttcttccacagactggaagagtccttcctggtggaagaggataagaagcacgagcggcaccccatcttcggcaacatcgtggacgaggtggcctaccacgagaagtaccccaccatctaccacctgagaaagaaactggtggacagcaccgacaaggccgacctgcggctgatctatctggccctggcccacatgatcaagttccggggccacttcctgatcgagggcgacctgaaccccgacaacagcgacgtggacaagctgttcatccagctggtgcagacctacaaccagctgttcgaggaaaaccccatcaacgccagcggcgtggacgccaaggccatcctgtctgccagactgagcaagagcagacggctggaaaatctgatcgcccagctgcccggcgagaagaagaatggcctgttcggcaacctgattgccctgagcctgggcctgacccccaacttcaagagcaacttcgacctggccgaggatgccaaactgcagctgagcaaggacacctacgacgacgacctggacaacctgctggcccagatcggcgaccagtacgccgacctgtttctggccgccaagaacctgtccgacgccatcctgctgagcgacatcctgagagtgaacaccgagatcaccaaggcccccctgagcgcctctatgatcaagagatacgacgagcaccaccaggacctgaccctgctgaaagctctcgtgcggcagcagctgcctgagaagtacaaagagattttcttcgaccagagcaagaacggctacgccggctacatcgatggcggagccagccaggaagagttctacaagttcatcaagcccatcctggaaaagatggacggcaccgaggaactgctcgtgaagctgaacagagaggacctgctgcggaagcagcggaccttcgacaacggcagcatcccccaccagatccacctgggagagctgcacgccattctgcggcggcaggaagatttttacccattcctgaaggacaaccgggaaaagatcgagaagatcctgaccttccgcatcccctactacgtgggccctctggccaggggaaacagcagattcgcctggatgaccagaaagagcgaggaaaccatcaccccctggaacttcgaggaagtggtggacaagggcgccagcgcccagagcttcatcgagcggatgaccaacttcgataagaacctgcccaacgagaaggtgctgcccaagcacagcctgctgtacgagtacttcaccgtgtacaacgagctgaccaaagtgaaatacgtgaccgagggaatgagaaagcccgccttcctgagcggcgagcagaaaaaagccatcgtggacctgctgttcaagaccaaccggaaagtgaccgtgaagcagctgaaagaggactacttcaagaaaatcgagtgcttcgactccgtggaaatctccggcgtggaagatcggttcaacgcctccctgggcacataccacgatctgctgaaaattatcaaggacaaggacttcctggacaatgaggaaaacgaggacattctggaagatatcgtgctgaccctgacactgtttgaggacagagagatgatcgaggaacggctgaaaacctatgcccacctgttcgacgacaaagtgatgaagcagctgaagcggcggagatacaccggctggggcaggctgagccggaagctgatcaacggcatccgggacaagcagtccggcaagacaatcctggatttcctgaagtccgacggcttcgccaacagaaacttcatgcagctgatccacgacgacagcctgacctttaaagaggacatccagaaagcccaggtgtccggccagggcgatagcctgcacgagcacattgccaatctggccggcagccccgccattaagaagggcatcctgcagacagtgaaggtggtggacgagctcgtgaaagtgatgggccggcacaagcccgagaacatcgtgatcgaaatggccagagagaaccagaccacccagaagggacagaagaacagccgcgagagaatgaagcggatcgaagagggcatcaaagagctgggcagccagatcctgaaagaacaccccgtggaaaacacccagctgcagaacgagaagctgtacctgtactacctgcagaatgggcgggatatgtacgtggaccaggaactggacatcaaccggctgtccgactacgatgtggacgctatcgtgcctcagagctttctgaaggacgactccatcgataacaaagtgctgactcggagcgacaagaaccggggcaagagcgacaacgtgccctccgaagaggtcgtgaagaagatgaagaactactggcgccagctgctgaatgccaagctgattacccagaggaagttcgacaatctgaccaaggccgagagaggcggcctgagcgaactggataaggccggcttcatcaagagacagctggtggaaacccggcagatcacaaagcacgtggcacagatcctggactcccggatgaacactaagtacgacgagaacgacaaactgatccgggaagtgaaagtgatcaccctgaagtccaagctggtgtccgatttccggaaggatttccagttttacaaagtgcgcgagatcaacaactaccaccacgcccacgacgcctacctgaacgccgtcgtgggaaccgccctgatcaaaaagtaccctaagctggaaagcgagttcgtgtacggcgactacaaggtgtacgacgtgcggaagatgatcgccaagagcgagcaggaaatcggcaaggctaccgccaagtacttcttctacagcaacatcatgaactttttcaagaccgagattaccctggccaacggcgagatccggaagcggcctctgatcgagacaaacggcgaaacaggcgagatcgtgtgggataagggccgggactttgccaccgtgcggaaagtgctgtctatgccccaagtgaatatcgtgaaaaagaccgaggtgcagacaggcggcttcagcaaagagtctatcctgcccaagaggaacagcgacaagctgatcgccagaaagaaggactgggaccctaagaagtacggcggcttcgacagccccaccgtggcctattctgtgctggtggtggccaaagtggaaaagggcaagtccaagaaactgaagagtgtgaaagagctgctggggatcaccatcatggaaagaagcagcttcgagaagaatcccatcgactttctggaagccaagggctacaaagaagtgaaaaaggacctgatcatcaagctgcctaagtactccctgttcgagctggaaaacggccggaagagaatgctggcctctgccggcgaactgcagaagggaaacgaactggccctgccctccaaatatgtgaacttcctgtacctggccagccactatgagaagctgaagggctcccccgaggataatgagcagaaacagctgtttgtggaacagcacaaacactacctggacgagatcatcgagcagatcagcgagttctccaagagagtgatcctggccgacgctaatctggacaaggtgctgagcgcctacaacaagcacagagacaagcctatcagagagcaggccgagaatatcatccacctgtttaccctgaccaatctgggagcccctgccgccttcaagtactttgacaccaccatcgaccggaagaggtacaccagcaccaaagaggtgctggacgccaccctgatccaccagagcatcaccggcctgtacgagacacggatcgacctgtctcagctgggaggcgacgcctatccctatgacgtgcccgattatgccagcctgggcagcggctcccccaagaaaaaacgcaaggtggaagatcctaagaaaaagcggaaagtggacggcctcgagtaatga

SEQ ID NO: 242 - DNA, 7908 bp, synthetic construct
  misc_feature 1..7908: note = V57 CDS
  source 1..7908: mol_type = other DNA
atgcctgctgctaagagagtgaaactggatggatccgccaagaccgtggcctatttctacgaccccgacgtgggcaacttccactacggagctggacaccctatgaagccccatcgcctggcattgacccatagcctggtcctgcattacggtctctataagaagatgatcgtgttcaagccataccaggcctcccaacatgacatgtgccgcttccactccgaggactacattgacttcctgcagagagtcagccccaccaatatgcaaggcttcaccaagagtcttaatgccttcaacgtaggcgatgactgcccagtgtttcccgggctctttgagttctgctcgcgttacacaggcgcatctctgcaaggagcaacccagctgaacaacaagatctgtgatattgccattaactgggctggtggtctgcaccatgccaagaagtttgaggcctctggcttctgctatgtcaacgacattgtgattggcatcctggagctgctcaagtaccaccctcgggtgctctacattgacattgacatccaccatggtgacggggttcaagaagctttctacctcactgaccgggtcatgacggtgtccttccacaaatacggaaattacttcttccctggcacaggtgacatgtatgaagtcggggcagagagtggccgctactactgtctgaacgtgcccctgcgggatggcattgatgaccagagttacaagcaccttttccagccggttatcaaccaggtagtggacttctaccaacccacgtgcattgtgctccagtgtggagctgactctctgggctgtgatcgattgggctgctttaacctcagcatccgagggcatggggaatgcgttgaatatgtcaagagcttcaatatccctctactcgtgctgggtggtggtggttatactgtccgaaatgttgcccgctgctggacatatgagacatcgctgctggtagaagaggccattagtgaggagcttccctatagtgaatacttcgagtactttgccccagacttcacacttcatccagatgtcagcacccgcatcgagaatcagaactcacgccagtatctggaccagatccgccagacaatctttgaaaacctgggagggccgagctctggcgcacccccaccaagtggagggtctcctgccgggtccccaacatctactgaagaaggcaccagcgaatccgcaacgcccgagtcaggccctggtacctccacagaaccatctgaaggtagtgcgcctggttccccagctggaagccctacttccaccgaagaaggcacgtcaaccgaaccaagtgaaggatctgcccctgggaccagcactgaaccatctgagccaaaaaagaagagaaaggtaatggacaagaagtacagcatcggcctggccatcggcaccaactctgtgggctgggccgtgatcaccgacgagtacaaggtgcccagcaagaaattcaaggtgctgggcaacaccgaccggcacagcatcaagaagaacctgatcggcgccctgctgttcgacagcggagaaacagccgaggccacccggctgaagagaaccgccagaagaagatacaccagacggaagaaccggatctgctatctgcaagagatcttcagcaacgagatggccaaggtggacgacagcttcttccacagactggaagagtccttcctggtggaagaggataagaagcacgagcggcaccccatcttcggcaacatcgtggacgaggtggcctaccacgagaagtaccccaccatctaccacctgagaaagaaactggtggacagcaccgacaaggccgacctgcggctgatctatctggccctggcccacatgatcaagttccggggccacttcctgatcgagggcgacctgaaccccgacaacagcgacgtggacaagctgttcatccagctggtgcagacctacaaccagctgttcgaggaaaaccccatcaacgccagcggcgtggacgccaaggccatcctgtctgccagactgagcaagagcagacggctggaaaatctgatcgcccagctgcccggcgagaagaagaatggcctgttcggcaacctgattgccctgagcctgggcctgacccccaacttcaagagcaacttcgacctggccgaggatgccaaactgcagctgagcaaggacacctacgacgacgacctggacaacctgctggcccagatcggcgaccagtacgccgacctgtttctggccgccaagaacctgtccgacgccatcctgctgagcgacatcctgagagtgaacaccgagatcaccaaggcccccctgagcgcctctatgatcaagagatacgacgagcaccaccaggacctgaccctgctgaaagctctcgtgcggcagcagctgcctgagaagtacaaagagattttcttcgaccagagcaagaacggctacgccggctacatcgatggcggagccagccaggaagagttctacaagttcatcaagcccatcctggaaaagatggacggcaccgaggaactgctcgtgaagctgaacagagaggacctgctgcggaagcagcggaccttcgacaacggcagcatcccccaccagatccacctgggagagctgcacgccattctgcggcggcaggaagatttttacccattcctgaaggacaaccgggaaaagatcgagaagatcctgaccttccgcatcccctactacgtgggccctctggccaggggaaacagcagattcgcctggatgaccagaaagagcgaggaaaccatcaccccctggaacttcgaggaagtggtggacaagggcgccagcgcccagagcttcatcgagcggatgaccaacttcgataagaacctgcccaacgagaaggtgctgcccaagcacagcctgctgtacgagtacttcaccgtgtacaacgagctgaccaaagtgaaatacgtgaccgagggaatgagaaagcccgccttcctgagcggcgagcagaaaaaagccatcgtggacctgctgttcaagaccaaccggaaagtgaccgtgaagcagctgaaagaggactacttcaagaaaatcgagtgcttcgactccgtggaaatctccggcgtggaagatcggttcaacgcctccctgggcacataccacgatctgctgaaaattatcaaggacaaggacttcctggacaatgaggaaaacgaggacattctggaagatatcgtgctgaccctgacactgtttgaggacagagagatgatcgaggaacggctgaaaacctatgcccacctgttcgacgacaaagtgatgaagcagctgaagcggcggagatacaccggctggggcaggctgagccggaagctgatcaacggcatccgggacaagcagtccggcaagacaatcctggatttcctgaagtccgacggcttcgccaacagaaacttcatgcagctgatccacgacgacagcctgacctttaaagaggacatccagaaagcccaggtgtccggccagggcgatagcctgcacgagcacattgccaatctggccggcagccccgccattaagaagggcatcctgcagacagtgaaggtggtggacgagctcgtgaaagtgatgggccggcacaagcccgagaacatcgtgatcgaaatggccagagagaaccagaccacccagaagggacagaagaacagccgcgagagaatgaagcggatcgaagagggcatcaaagagctgggcagccagatcctgaaagaacaccccgtggaaaacacccagctgcagaacgagaagctgtacctgtactacctgcagaatgggcgggatatgtacgtggaccaggaactggacatcaaccggctgtccgactacgatgtggacgctatcgtgcctcagagctttctgaaggacgactccatcgataacaaagtgctgactcggagcgacaagaaccggggcaagagcgacaacgtgccctccgaagaggtcgtgaagaagatgaagaactactggcgccagctgctgaatgccaagctgattacccagaggaagttcgacaatctgaccaaggccgagagaggcggcctgagcgaactggataaggccggcttcatcaagagacagctggtggaaacccggcagatcacaaagcacgtggcacagatcctggactcccggatgaacactaagtacgacgagaacgacaaactgatccgggaagtgaaagtgatcaccctgaagtccaagctggtgtccgatttccggaaggatttccagttttacaaagtgcgcgagatcaacaactaccaccacgcccacgacgcctacctgaacgccgtcgtgggaaccgccctgatcaaaaagtaccctaagctggaaagcgagttcgtgtacggcgactacaaggtgtacgacgtgcggaagatgatcgccaagagcgagcaggaaatcggcaaggctaccgccaagtacttcttctacagcaacatcatgaactttttcaagaccgagattaccctggccaacggcgagatccggaagcggcctctgatcgagacaaacggcgaaacaggcgagatcgtgtgggataagggccgggactttgccaccgtgcggaaagtgctgtctatgccccaagtgaatatcgtgaaaaagaccgaggtgcagacaggcggcttcagcaaagagtctatcctgcccaagaggaacagcgacaagctgatcgccagaaagaaggactgggaccctaagaagtacggcggcttcgacagccccaccgtggcctattctgtgctggtggtggccaaagtggaaaagggcaagtccaagaaactgaagagtgtgaaagagctgctggggatcaccatcatggaaagaagcagcttcgagaagaatcccatcgactttctggaagccaagggctacaaagaagtgaaaaaggacctgatcatcaagctgcctaagtactccctgttcgagctggaaaacggccggaagagaatgctggcctctgccggcgaactgcagaagggaaacgaactggccctgccctccaaatatgtgaacttcctgtacctggccagccactatgagaagctgaagggctcccccgaggataatgagcagaaacagctgtttgtggaacagcacaaacactacctggacgagatcatcgagcagatcagcgagttctccaagagagtgatcctggccgacgctaatctggacaaggtgctgagcgcctacaacaagcacagagacaagcctatcagagagcaggccgagaatatcatccacctgtttaccctgaccaatctgggagcccctgccgccttcaagtactttgacaccaccatcgaccggaagaggtacaccagcaccaaagaggtgctggacgccaccctgatccaccagagcatcaccggcctgtacgagacacggatcgacctgtctcagctgggaggcgacgcctatccctatgacgtgcccgattatgccagcctgggcagcggctcccccaagaaaaaacgcaaggtggaagatcctaagaaaaagcggaaagtggacggcagcggcagcgagacccccggtaccagcgagagcgccacccccgagagccggacactcggccagactgggaagaaatctgagaagggaccagtttgttggcggaagcgtgtaaaatcagagtacatgcgactgagacagctcaagaggttcagacgagctgatgaagtaaagagtatgtttagttccaatcgtcagaaaattttggaaagaacggaaatcttaaaccaagaatggaaacagcgaaggatacagcctgtgcacatcctgacttctgtgagctcattgcgcgggactagggagtgttcggtgaccagtgacttggattttccaacacaagtcatcccattaaagactctgaatgcagttgcttcagtacccataatgtattcttggtctcccctacagcagaattttatggtggaagatgaaactgttttacataacattccttatatgggagatgaagttttagatcaggatggtactttcattgaagaactaataaaaaattatgatgggaaagtacacggggatagagaatgtgggtttataaatgatgaaatttttgtggagttggtgaatgcccttggtcaatataatgatgatgacgatgatgatgatggagacgatcctgaagaaagagaagaaaagcagaaagatctggaggatcaccgagatgataaagaaagccgcccacctcggaaatttccttctgataaaatttttgaagccatttcctcaatgtttccagataagggcacagcagaagaactaaaggaaaaatataaagaactcaccgaacagcagctcccaggcgcacttcctcctgaatgtacccccaacatagatggaccaaatgctaaatctgttcagagagagcaaagcttacactcctttcatacgcttttctgtaggcgatgttttaaatatgactgcttcctacatccttttcatgcaacacccaacacttataagcggaagaacacagaaacagctctagacaacaaaccttgtggaccacagtgttaccagcatttggagggagcaaaggagtttgctgctgctctcaccgctgagcggataaagaccccaccaaaacgtccaggaggccgcagaagaggacggcttcccaataacagtagcaggcccagcacccccaccattaatgtgctggaatcaaaggatacagacagtgatagggaagcagggactgaaacggggggagagaacaatgataaagaagaagaagagaagaaagatgaaacttcgagctcctctgaagcaaattctcggtgtcaaacaccaataaagatgaagccaaatattgaacctcctgagaatgtggagtggagtggtgctgaagcctcaatgtttagagtcctcattggcacttactatgacaatttctgtgccattgctaggttaattgggaccaaaacatgtagacaggtgtatgagtttagagtcaaagaatctagcatcatagctccagctcccgctgaggatgtggatactcctccaaggaaaaagaagaggaaacaccggttgtgggctgcacactgcagaaagatacagctgaaaaaggacggctcctctaaccatgtttacaactatcaaccctgtgatcatccacggcagccttgtgacagttcgtgcccttgtgtgatagcacaaaatttttgtgaaaagttttgtcaatgtagttcagagtgtcaaaaccgctttccgggatgccgctgcaaagcacagtgcaacaccaagcagtgcccgtgctacctggctgtccgagagtgtgaccctgacctctgtcttacttgtggagccgctgaccattgggacagtaaaaatgtgtcctgcaagaactgcagtattcagcggggctccaaaaagcatctattgctggcaccatctgacgtggcaggctgggggatttttatcaaagatcctgtgcagaaaaatgaattcatctcagaatactgtggagagattatttctcaagatgaagctgacagaagagggaaagtgtatgataaatacatgtgcagctttctgttcaacttgaacaatgattttgtggtggatgcaacccgcaagggtaacaaaattcgttttgcaaatcattcggtaaatccaaactgctatgcaaaagttatgatggttaacggtgatcacaggataggtatttttgccaagagagccatccagactggcgaagagctgttttttgattacagatacagccaggctgatgccctgaagtatgtcggcatcgaaagagaaatggaaatccctgagggcagcggctaatga

SEQ ID NO: 243 - DNA, 6999 bp, synthetic construct
  misc_feature 1..6999: note = V58 CDS
  source 1..6999: mol_type = other DNA
atgcctgctgctaagagagtgaaactggatggatcccggacactggtgaccttcaaggatgtatttgtggacttcaccagggaggagtggaagctgctggacactgctcagcagatcgtgtacagaaatgtgatgctggagaactataagaacctggtttccttgggttatcagcttactaagccagatgtgatcctccggttggagaagggagaagagcccggagggccgagctctggcgcacccccaccaagtggagggtctcctgccgggtccccaacatctactgaagaaggcaccagcgaatccgcaacgcccgagtcaggccctggtacctccacagaaccatctgaaggtagtgcgcctggttccccagctggaagccctacttccaccgaagaaggcacgtcaaccgaaccaagtgaaggatctgcccctgggaccagcactgaaccatctgagccaaaaaagaagagaaaggtaatggacaagaagtacagcatcggcctggccatcggcaccaactctgtgggctgggccgtgatcaccgacgagtacaaggtgcccagcaagaaattcaaggtgctgggcaacaccgaccggcacagcatcaagaagaacctgatcggcgccctgctgttcgacagcggagaaacagccgaggccacccggctgaagagaaccgccagaagaagatacaccagacggaagaaccggatctgctatctgcaagagatcttcagcaacgagatggccaaggtggacgacagcttcttccacagactggaagagtccttcctggtggaagaggataagaagcacgagcggcaccccatcttcggcaacatcgtggacgaggtggcctaccacgagaagtaccccaccatctaccacctgagaaagaaactggtggacagcaccgacaaggccgacctgcggctgatctatctggccctggcccacatgatcaagttccggggccacttcctgatcgagggcgacctgaaccccgacaacagcgacgtggacaagctgttcatccagctggtgcagacctacaaccagctgttcgaggaaaaccccatcaacgccagcggcgtggacgccaaggccatcctgtctgccagactgagcaagagcagacggctggaaaatctgatcgcccagctgcccggcgagaagaagaatggcctgttcggcaacctgattgccctgagcctgggcctgacccccaacttcaagagcaacttcgacctggccgaggatgccaaactgcagctgagcaaggacacctacgacgacgacctggacaacctgctggcccagatcggcgaccagtacgccgacctgtttctggccgccaagaacctgtccgacgccatcctgctgagcgacatcctgagagtgaacaccgagatcaccaaggcccccctgagcgcctctatgatcaagagatacgacgagcaccaccaggacctgaccctgctgaaagctctcgtgcggcagcagctgcctgagaagtacaaagagattttcttcgaccagagcaagaacggctacgccggctacatcgatggcggagccagccaggaagagttctacaagttcatcaagcccatcctggaaaagatggacggcaccgaggaactgctcgtgaagctgaacagagaggacctgctgcggaagcagcggaccttcgacaacggcagcatcccccaccagatccacctgggagagctgcacgccattctgcggcggcaggaagatttttacccattcctgaaggacaaccgggaaaagatcgagaagatcctgaccttccgcatcccctactacgtgggccctctggccaggggaaacagcagattcgcctggatgaccagaaagagcgaggaaaccatcaccccctggaacttcgaggaagtggtggacaagggcgccagcgcccagagcttcatcgagcggatgaccaacttcgataagaacctgcccaacgagaaggtgctgcccaagcacagcctgctgtacgagtacttcaccgtgtacaacgagctgaccaaagtgaaatacgtgaccgagggaatgagaaagcccgccttcctgagcggcgagcagaaaaaagccatcgtggacctgctgttcaagaccaaccggaaagtgaccgtgaagcagctgaaagaggactacttcaagaaaatcgagtgcttcgactccgtggaaatctccggcgtggaagatcggttcaacgcctccctgggcacataccacgatctgctgaaaattatcaaggacaaggacttcctggacaatgaggaaaacgaggacattctggaagatatcgtgctgaccctgacactgtttgaggacagagagatgatcgaggaacggctgaaaacctatgcccacctgttcgacgacaaagtgatgaagcagctgaagcggcggagatacaccggctggggcaggctgagccggaagctgatcaacggcatccgggacaagcagtccggcaagacaatcctggatttcctgaagtccgacggcttcgccaacagaaacttcatgcagctgatccacgacgacagcctgacctttaaagaggacatccagaaagcccaggtgtccggccagggcgatagcctgcacgagcacattgccaatctggccggcagccccgccattaagaagggcatcctgcagacagtgaaggtggtggacgagctcgtgaaagtgatgggccggcacaagcccgagaacatcgtgatcgaaatggccagagagaaccagaccacccagaagggacagaagaacagccgcgagagaatgaagcggatcgaagagggcatcaaagagctgggcagccagatcctgaaagaacaccccgtggaaaacacccagctgcagaacgagaagctgtacctgtactacctgcagaatgggcgggatatgtacgtggaccaggaactggacatcaaccggctgtccgactacgatgtggacgctatcgtgcctcagagctttctgaaggacgactccatcgataacaaagtgctgactcggagcgacaagaaccggggcaagagcgacaacgtgccctccgaagaggtcgtgaagaagatgaagaactactggcgccagctgctgaatgccaagctgattacccagaggaagttcgacaatctgaccaaggccgagagaggcggcctgagcgaactggataaggccggcttcatcaagagacagctggtggaaacccggcagatcacaaagcacgtggcacagatcctggactcccggatgaacactaagtacgacgagaacgacaaactgatccgggaagtgaaagtgatcaccctgaagtccaagctggtgtccgatttccggaaggatttccagttttacaaagtgcgcgagatcaacaactaccaccacgcccacgacgcctacctgaacgccgtcgtgggaaccgccctgatcaaaaagtaccctaagctggaaagcgagttcgtgtacggcgactacaaggtgtacgacgtgcggaagatgatcgccaagagcgagcaggaaatcggcaaggctaccgccaagtacttcttctacagcaacatcatgaactttttcaagaccgagattaccctggccaacggcgagatccggaagcggcctctgatcgagacaaacggcgaaacaggcgagatcgtgtgggataagggccgggactttgccaccgtgcggaaagtgctgtctatgccccaagtgaatatcgtgaaaaagaccgaggtgcagacaggcggcttcagcaaagagtctatcctgcccaagaggaacagcgacaagctgatcgccagaaagaaggactgggaccctaagaagtacggcggcttcgacagccccaccgtggcctattctgtgctggtggtggccaaagtggaaaagggcaagtccaagaaactgaagagtgtgaaagagctgctggggatcaccatcatggaaagaagcagcttcgagaagaatcccatcgactttctggaagccaagggctacaaagaagtgaaaaaggacctgatcatcaagctgcctaagtactccctgttcgagctggaaaacggccggaagagaatgctggcctctgccggcgaactgcagaagggaaacgaactggccctgccctccaaatatgtgaacttcctgtacctggccagccactatgagaagctgaagggctcccccgaggataatgagcagaaacagctgtttgtggaacagcacaaacactacctggacgagatcatcgagcagatcagcgagttctccaagagagtgatcctggccgacgctaatctggacaaggtgctgagcgcctacaacaagcacagagacaagcctatcagagagcaggccgagaatatcatccacctgtttaccctgaccaatctgggagcccctgccgccttcaagtactttgacaccaccatcgaccggaagaggtacaccagcaccaaagaggtgctggacgccaccctgatccaccagagcatcaccggcctgtacgagacacggatcgacctgtctcagctgggaggcgacgcctatccctatgacgtgcccgattatgccagcctgggcagcggctcccccaagaaaaaacgcaaggtggaagatcctaagaaaaagcggaaagtggacggcagcggcagcgagacccccggtaccagcgagagcgccacccccgagagccggacactcggccagactgggaagaaatctgagaagggaccagtttgttggcggaagcgtgtaaaatcagagtacatgcgactgagacagctcaagaggttcagacgagctgatgaagtaaagagtatgtttagttccaatcgtcagaaaattttggaaagaacggaaatcttaaaccaagaatggaaacagcgaaggatacagcctgtgcacatcctgacttctgtgagctcattgcgcgggactagggagtgttcggtgaccagtgacttggattttccaacacaagtcatcccattaaagactctgaatgcagttgcttcagtacccataatgtattcttggtctcccctacagcagaattttatggtggaagatgaaactgttttacataacattccttatatgggagatgaagttttagatcaggatggtactttcattgaagaactaataaaaaattatgatgggaaagtacacggggatagagaatgtgggtttataaatgatgaaatttttgtggagttggtgaatgcccttggtcaatataatgatgatgacgatgatgatgatggagacgatcctgaagaaagagaagaaaagcagaaagatctggaggatcaccgagatgataaagaaagccgcccacctcggaaatttccttctgataaaatttttgaagccatttcctcaatgtttccagataagggcacagcagaagaactaaaggaaaaatataaagaactcaccgaacagcagctcccaggcgcacttcctcctgaatgtacccccaacatagatggaccaaatgctaaatctgttcagagagagcaaagcttacactcctttcatacgcttttctgtaggcgatgttttaaatatgactgcttcctacatccttttcatgcaacacccaacacttataagcggaagaacacagaaacagctctagacaacaaaccttgtggaccacagtgttaccagcatttggagggagcaaaggagtttgctgctgctctcaccgctgagcggataaagaccccaccaaaacgtccaggaggccgcagaagaggacggcttcccaataacagtagcaggcccagcacccccaccattaatgtgctggaatcaaaggatacagacagtgatagggaagcagggactgaaacggggggagagaacaatgataaagaagaagaagagaagaaagatgaaacttcgagctcctctgaagcaaattctcggtgtcaaacaccaataaagatgaagccaaatattgaacctcctgagaatgtggagtggagtggtgctgaagcctcaatgtttagagtcctcattggcacttactatgacaatttctgtgccattgctaggttaattgggaccaaaacatgtagacaggtgtatgagtttagagtcaaagaatctagcatcatagctccagctcccgctgaggatgtggatactcctccaaggaaaaagaagaggaaacaccggttgtgggctgcacactgcagaaagatacagctgaaaaaggacggctcctctaaccatgtttacaactatcaaccctgtgatcatccacggcagccttgtgacagttcgtgcccttgtgtgatagcacaaaatttttgtgaaaagttttgtcaatgtagttcagagtgtcaaaaccgctttccgggatgccgctgcaaagcacagtgcaacaccaagcagtgcccgtgctacctggctgtccgagagtgtgaccctgacctctgtcttacttgtggagccgctgaccattgggacagtaaaaatgtgtcctgcaagaactgcagtattcagcggggctccaaaaagcatctattgctggcaccatctgacgtggcaggctgggggatttttatcaaagatcctgtgcagaaaaatgaattcatctcagaatactgtggagagattatttctcaagatgaagctgacagaagagggaaagtgtatgataaatacatgtgcagctttctgttcaacttgaacaatgattttgtggtggatgcaacccgcaagggtaacaaaattcgttttgcaaatcattcggtaaatccaaactgctatgcaaaagttatgatggttaacggtgatcacaggataggtatttttgccaagagagccatccagactggcgaagagctgttttttgattacagatacagccaggctgatgccctgaagtatgtcggcatcgaaagagaaatggaaatccctgagggcagcggctaatga

SEQ ID NO: 244 - DNA, 8145 bp, synthetic construct
  misc_feature 1..8145: note = V59 CDS
  source 1..8145: mol_type = other DNA
atgcctgctgctaagagagtgaaactggatggatcccggacactggtgaccttcaaggatgtatttgtggacttcaccagggaggagtggaagctgctggacactgctcagcagatcgtgtacagaaatgtgatgctggagaactataagaacctggtttccttgggttatcagcttactaagccagatgtgatcctccggttggagaagggagaagagcccggagggccgagctctggcgcacccccaccaagtggagggtctcctgccgggtccccaacatctactgaagaaggcaccagcgaatccgcaacgcccgagtcaggccctggtacctccacagaaccatctgaaggtagtgcgcctggttccccagctggaagccctacttccaccgaagaaggcacgtcaaccgaaccaagtgaaggatctgcccctgggaccagcactgaaccatctgagatgaaccatgaccaggaatttgaccccccaaaggtttacccacctgtgccagctgagaagaggaagcccatccgcgtgctgtctctctttgatgggattgctacagggctcctggtgctgaaggacctgggcatccaagtggaccgctacattgcctccgaggtgtgtgaggactccatcacggtgggcatggtgcggcaccagggaaagatcatgtacgtcggggacgtccgcagcgtcacacagaagcatatccaggagtggggcccattcgacctggtgattggaggcagtccctgcaatgacctctccattgtcaaccctgcccgcaagggactttatgagggtactggccgcctcttctttgagttctaccgcctcctgcatgatgcgcggcccaaggagggagatgatcgccccttcttctggctctttgagaatgtggtggccatgggcgttagtgacaagagggacatctcgcgatttcttgagtctaaccccgtgatgattgacgccaaagaagtgtctgctgcacacagggcccgttacttctggggtaaccttcctggcatgaacaggcctttggcatccactgtgaatgataagctggagctgcaagagtgtctggagcacggcagaatagccaagttcagcaaagtgaggaccattaccaccaggtcaaactctataaagcagggcaaagaccagcatttccccgtcttcatgaacgagaaggaggacatcctgtggtgcactgaaatggaaagggtgtttggcttccccgtccactacacagacgtctccaacatgagccgcttggcgaggcagagactgctgggccgatcgtggagcgtgccggtcatccgccacctcttcgctccgctgaaggaatattttgcttgtgtgggagggccgagctctggcgcacccccaccaagtggagggtctcctgccgggtccccaacatctactgaagaaggcaccagcgaatccgcaacgcccgagtcaggccctggtacctccacagaaccatctgaaggtagtgcgcctggttccccagctggaagccctacttccaccgaagaaggcacgtcaaccgaaccaagtgaaggatctgcccctgggaccagcactgaaccatctgagccaaaaaagaagagaaaggtaatggacaagaagtacagcatcggcctggccatcggcaccaactctgtgggctgggccgtgatcaccgacgagtacaaggtgcccagcaagaaattcaaggtgctgggcaacaccgaccggcacagcatcaagaagaacctgatcggcgccctgctgttcgacagcggagaaacagccgaggccacccggctgaagagaaccgccagaagaagatacaccagacggaagaaccggatctgctatctgcaagagatcttcagcaacgagatggccaaggtggacgacagcttcttccacagactggaagagtccttcctggtggaagaggataagaagcacgagcggcaccccatcttcggcaacatcgtggacgaggtggcctaccacgagaagtaccccaccatctaccacctgagaaagaaactggtggacagcaccgacaaggccgacctgcggctgatctatctggccctggcccacatgatcaagttccggggccacttcctgatcgagggcgacctgaaccccgacaacagcgacgtggacaagctgttcatccagctggtgcagacctacaaccagctgttcgaggaaaaccccatcaacgccagcggcgtggacgccaaggccatcctgtctgccagactgagcaagagcagacggctggaaaatctgatcgcccagctgcccggcgagaagaagaatggcctgttcggcaacctgattgccctgagcctgggcctgacccccaacttcaagagcaacttcgacctggccgaggatgccaaactgcagctgagcaaggacacctacgacgacgacctggacaacctgctggcccagatcggcgaccagtacgccgacctgtttctggccgccaagaacctgtccgacgccatcctgctgagcgacatcctgagagtgaacaccgagatcaccaaggcccccctgagcgcctctatgatcaagagatacgacgagcaccaccaggacctgaccctgctgaaagctctcgtgcggcagcagctgcctgagaagtacaaagagattttcttcgaccagagcaagaacggctacgccggctacatcgatggcggagccagccaggaagagttctacaagttcatcaagcccatcctggaaaagatggacggcaccgaggaactgctcgtgaagctgaacagagaggacctgctgcggaagcagcggaccttcgacaacggcagcatcccccaccagatccacctgggagagctgcacgccattctgcggcggcaggaagatttttacccattcctgaaggacaaccgggaaaagatcgagaagatcctgaccttccgcatcccctactacgtgggccctctggccaggggaaacagcagattcgcctggatgaccagaaagagcgaggaaaccatcaccccctggaacttcgaggaagtggtggacaagggcgccagcgcccagagcttcatcgagcggatgaccaacttcgataagaacctgcccaacgagaaggtgctgcccaagcacagcctgctgtacgagtacttcaccgtgtacaacgagctgaccaaagtgaaatacgtgaccgagggaatgagaaagcccgccttcctgagcggcgagcagaaaaaagccatcgtggacctgctgttcaagaccaaccggaaagtgaccgtgaagcagctgaaagaggactacttcaagaaaatcgagtgcttcgactccgtggaaatctccggcgtggaagatcggttcaacgcctccctgggcacataccacgatctgctgaaaattatcaaggacaaggacttcctggacaatgaggaaaacgaggacattctggaagatatcgtgctgaccctgacactgtttgaggacagagagatgatcgaggaacggctgaaaacctatgcccacctgttcgacgacaaagtgatgaagcagctgaagcggcggagatacaccggctggggcaggctgagccggaagctgatcaacggcatccgggacaagcagtccggcaagacaatcctggatttcctgaagtccgacggcttcgccaacagaaacttcatgcagctgatccacgacgacagcctgacctttaaagaggacatccagaaagcccaggtgtccggccagggcgatagcctgcacgagcacattgccaatctggccggcagccccgccattaagaagggcatcctgcagacagtgaaggtggtggacgagctcgtgaaagtgatgggccggcacaagcccgagaacatcgtgatcgaaatggccagagagaaccagaccacccagaagggacagaagaacagccgcgagagaatgaagcggatcgaagagggcatcaaagagctgggcagccagatcctgaaagaacaccccgtggaaaacacccagctgcagaacgagaagctgtacctgtactacctgcagaatgggcgggatatgtacgtggaccaggaactggacatcaaccggctgtccgactacgatgtggacgctatcgtgcctcagagctttctgaaggacgactccatcgataacaaagtgctgactcggagcgacaagaaccggggcaagagcgacaacgtgccctccgaagaggtcgtgaagaagatgaagaactactggcgccagctgctgaatgccaagctgattacccagaggaagttcgacaatctgaccaaggccgagagaggcggcctgagcgaactggataaggccggcttcatcaagagacagctggtggaaacccggcagatcacaaagcacgtggcacagatcctggactcccggatgaacactaagtacgacgagaacgacaaactgatccgggaagtgaaagtgatcaccctgaagtccaagctggtgtccgatttccggaaggatttccagttttacaaagtgcgcgagatcaacaactaccaccacgcccacgacgcctacctgaacgccgtcgtgggaaccgccctgatcaaaaagtaccctaagctggaaagcgagttcgtgtacggcgactacaaggtgtacgacgtgcggaagatgatcgccaagagcgagcaggaaatcggcaaggctaccgccaagtacttcttctacagcaacatcatgaactttttcaagaccgagattaccctggccaacggcgagatccggaagcggcctctgatcgagacaaacggcgaaacaggcgagatcgtgtgggataagggccgggactttgccaccgtgcggaaagtgctgtctatgccccaagtgaatatcgtgaaaaagaccgaggtgcagacaggcggcttcagcaaagagtctatcctgcccaagaggaacagcgacaagctgatcgccagaaagaaggactgggaccctaagaagtacggcggcttcgacagccccaccgtggcctattctgtgctggtggtggccaaagtggaaaagggcaagtccaagaaactgaagagtgtgaaagagctgctggggatcaccatcatggaaagaagcagcttcgagaagaatcccatcgactttctggaagccaagggctacaaagaagtgaaaaaggacctgatcatcaagctgcctaagtactccctgttcgagctggaaaacggccggaagagaatgctggcctctgccggcgaactgcagaagggaaacgaactggccctgccctccaaatatgtgaacttcctgtacctggccagccactatgagaagctgaagggctcccccgaggataatgagcagaaacagctgtttgtggaacagcacaaacactacctggacgagatcatcgagcagatcagcgagttctccaagagagtgatcctggccgacgctaatctggacaaggtgctgagcgcctacaacaagcacagagacaagcctatcagagagcaggccgagaatatcatccacctgtttaccctgaccaatctgggagcccctgccgccttcaagtactttgacaccaccatcgaccggaagaggtacaccagcaccaaagaggtgctggacgccaccctgatccaccagagcatcaccggcctgtacgagacacggatcgacctgtctcagctgggaggcgacgcctatccctatgacgtgcccgattatgccagcctgggcagcggctcccccaagaaaaaacgcaaggtggaagatcctaagaaaaagcggaaagtggacggcagcggcagcgagacccccggtaccagcgagagcgccacccccgagagccggacactcggccagactgggaagaaatctgagaagggaccagtttgttggcggaagcgtgtaaaatcagagtacatgcgactgagacagctcaagaggttcagacgagctgatgaagtaaagagtatgtttagttccaatcgtcagaaaattttggaaagaacggaaatcttaaaccaagaatggaaacagcgaaggatacagcctgtgcacatcctgacttctgtgagctcattgcgcgggactagggagtgttcggtgaccagtgacttggattttccaacacaagtcatcccattaaagactctgaatgcagttgcttcagtacccataatgtattcttggtctcccctacagcagaattttatggtggaagatgaaactgttttacataacattccttatatgggagatgaagttttagatcaggatggtactttcattgaagaactaataaaaaattatgatgggaaagtacacggggatagagaatgtgggtttataaatgatgaaatttttgtggagttggtgaatgcccttggtcaatataatgatgatgacgatgatgatgatggagacgatcctgaagaaagagaagaaaagcagaaagatctggaggatcaccgagatgataaagaaagccgcccacctcggaaatttccttctgataaaatttttgaagccatttcctcaatgtttccagataagggcacagcagaagaactaaaggaaaaatataaagaactcaccgaacagcagctcccaggcgcacttcctcctgaatgtacccccaacatagatggaccaaatgctaaatctgttcagagagagcaaagcttacactcctttcatacgcttttctgtaggcgatgttttaaatatgactgcttcctacatccttttcatgcaacacccaacacttataagcggaagaacacagaaacagctctagacaacaaaccttgtggaccacagtgttaccagcatttggagggagcaaaggagtttgctgctgctctcaccgctgagcggataaagaccccaccaaaacgtccaggaggccgcagaagaggacggcttcccaataacagtagcaggcccagcacccccaccattaatgtgctggaatcaaaggatacagacagtgatagggaagcagggactgaaacggggggagagaacaatgataaagaagaagaagagaagaaagatgaaacttcgagctcctctgaagcaaattctcggtgtcaaacaccaataaagatgaagccaaatattgaacctcctgagaatgtggagtggagtggtgctgaagcctcaatgtttagagtcctcattggcacttactatgacaatttctgtgccattgctaggttaattgggaccaaaacatgtagacaggtgtatgagtttagagtcaaagaatctagcatcatagctccagctcccgctgaggatgtggatactcctccaaggaaaaagaagaggaaacaccggttgtgggctgcacactgcagaaagatacagctgaaaaaggacggctcctctaaccatgtttacaactatcaaccctgtgatcatccacggcagccttgtgacagttcgtgcccttgtgtgatagcacaaaatttttgtgaaaagttttgtcaatgtagttcagagtgtcaaaaccgctttccgggatgccgctgcaaagcacagtgcaacaccaagcagtgcccgtgctacctggctgtccgagagtgtgaccctgacctctgtcttacttgtggagccgctgaccattgggacagtaaaaatgtgtcctgcaagaactgcagtattcagcggggctccaaaaagcatctattgctggcaccatctgacgtggcaggctgggggatttttatcaaagatcctgtgcagaaaaatgaattcatctcagaatactgtggagagattatttctcaagatgaagctgacagaagagggaaagtgtatgataaatacatgtgcagctttctgttcaacttgaacaatgattttgtggtggatgcaacccgcaagggtaacaaaattcgttttgcaaatcattcggtaaatccaaactgctatgcaaaagttatgatggttaacggtgatcacaggataggtatttttgccaagagagccatccagactggcgaagagctgttttttgattacagatacagccaggctgatgccctgaagtatgtcggcatcgaaagagaaatggaaatccctgagggcagcggctaatga

SEQ ID NO: 245 - DNA, 7191 bp, synthetic construct
  misc_feature 1..7191: note = V60 CDS
  source 1..7191: mol_type = other DNA
atgcctgctgctaagagagtgaaactggatggatcccggacactggtgaccttcaaggatgtatttgtggacttcaccagggaggagtggaagctgctggacactgctcagcagatcgtgtacagaaatgtgatgctggagaactataagaacctggtttccttgggttatcagcttactaagccagatgtgatcctccggttggagaagggagaagagcccggagggccgagctctggcgcacccccaccaagtggagggtctcctgccgggtccccaacatctactgaagaaggcaccagcgaatccgcaacgcccgagtcaggccctggtacctccacagaaccatctgaaggtagtgcgcctggttccccagctggaagccctacttccaccgaagaaggcacgtcaaccgaaccaagtgaaggatctgcccctgggaccagcactgaaccatctgagatgaaccatgaccaggaatttgaccccccaaaggtttacccacctgtgccagctgagaagaggaagcccatccgcgtgctgtctctctttgatgggattgctacagggctcctggtgctgaaggacctgggcatccaagtggaccgctacattgcctccgaggtgtgtgaggactccatcacggtgggcatggtgcggcaccagggaaagatcatgtacgtcggggacgtccgcagcgtcacacagaagcatatccaggagtggggcccattcgacctggtgattggaggcagtccctgcaatgacctctccattgtcaaccctgcccgcaagggactttatgagggtactggccgcctcttctttgagttctaccgcctcctgcatgatgcgcggcccaaggagggagatgatcgccccttcttctggctctttgagaatgtggtggccatgggcgttagtgacaagagggacatctcgcgatttcttgagtctaaccccgtgatgattgacgccaaagaagtgtctgctgcacacagggcccgttacttctggggtaaccttcctggcatgaacaggcctttggcatccactgtgaatgataagctggagctgcaagagtgtctggagcacggcagaatagccaagttcagcaaagtgaggaccattaccaccaggtcaaactctataaagcagggcaaagaccagcatttccccgtcttcatgaacgagaaggaggacatcctgtggtgcactgaaatggaaagggtgtttggcttccccgtccactacacagacgtctccaacatgagccgcttggcgaggcagagactgctgggccgatcgtggagcgtgccggtcatccgccacctcttcgctccgctgaaggaatattttgcttgtgtgggagggccgagctctggcgcacccccaccaagtggagggtctcctgccgggtccccaacatctactgaagaaggcaccagcgaatccgcaacgcccgagtcaggccctggtacctccacagaaccatctgaaggtagtgcgcctggttccccagctggaagccctacttccaccgaagaaggcacgtcaaccgaaccaagtgaaggatctgcccctgggaccagcactgaaccatctgagccaaaaaagaagagaaaggtaatggacaagaagtacagcatcggcctggccatcggcaccaactctgtgggctgggccgtgatcaccgacgagtacaaggtgcccagcaagaaattcaaggtgctgggcaacaccgaccggcacagcatcaagaagaacctgatcggcgccctgctgttcgacagcggagaaacagccgaggccacccggctgaagagaaccgccagaagaagatacaccagacggaagaaccggatctgctatctgcaagagatcttcagcaacgagatggccaaggtggacgacagcttcttccacagactggaagagtccttcctggtggaagaggataagaagcacgagcggcaccccatcttcggcaacatcgtggacgaggtggcctaccacgagaagtaccccaccatctaccacctgagaaagaaactggtggacagcaccgacaaggccgacctgcggctgatctatctggccctggcccacatgatcaagttccggggccacttcctgatcgagggcgacctgaaccccgacaacagcgacgtggacaagctgttcatccagctggtgcagacctacaaccagctgttcgaggaaaaccccatcaacgccagcggcgtggacgccaaggccatcctgtctgccagactgagcaagagcagacggctggaaaatctgatcgcccagctgcccggcgagaagaagaatggcctgttcggcaacctgattgccctgagcctgggcctgacccccaacttcaagagcaacttcgacctggccgaggatgccaaactgcagctgagcaaggacacctacgacgacgacctggacaacctgctggcccagatcggcgaccagtacgccgacctgtttctggccgccaagaacctgtccgacgccatcctgctgagcgacatcctgagagtgaacaccgagatcaccaaggcccccctgagcgcctctatgatcaagagatacgacgagcaccaccaggacctgaccctgctgaaagctctcgtgcggcagcagctgcctgagaagtacaaagagattttcttcgaccagagcaagaacggctacgccggctacatcgatggcggagccagccaggaagagttctacaagttcatcaagcccatcctggaaaagatggacggcaccgaggaactgctcgtgaagctgaacagagaggacctgctgcggaagcagcggaccttcgacaacggcagcatcccccaccagatccacctgggagagctgcacgccattctgcggcggcaggaagatttttacccattcctgaaggacaaccgggaaaagatcgagaagatcctgaccttccgcatcccctactacgtgggccctctggccaggggaaacagcagattcgcctggatgaccagaaagagcgaggaaaccatcaccccctggaacttcgaggaagtggtggacaagggcgccagcgcccagagcttcatcgagcggatgaccaacttcgataagaacctgcccaacgagaaggtgctgcccaagcacagcctgctgtacgagtacttcaccgtgtacaacgagctgaccaaagtgaaatacgtgaccgagggaatgagaaagcccgccttcctgagcggcgagcagaaaaaagccatcgtggacctgctgttcaagaccaaccggaaagtgaccgtgaagcagctgaaagaggactacttcaagaaaatcgagtgcttcgactccgtggaaatctccggcgtggaagatcggttcaacgcctccctgggcacataccacgatctgctgaaaattatcaaggacaaggacttcctggacaatgaggaaaacgaggacattctggaagatatcgtgctgaccctgacactgtttgaggacagagagatgatcgaggaacggctgaaaacctatgcccacctgttcgacgacaaagtgatgaagcagctgaagcggcggagatacaccggctggggcaggctgagccggaagctgatcaacggcatccgggacaagcagtccggcaagacaatcctggatttcctgaagtccgacggcttcgccaacagaaacttcatgcagctgatccacgacgacagcctgacctttaaagaggacatccagaaagcccaggtgtccggccagggcgatagcctgcacgagcacattgccaatctggccggcagccccgccattaagaagggcatcctgcagacagtgaaggtggtggacgagctcgtgaaagtgatgggccggcacaagcccgagaacatcgtgatcgaaatggccagagagaaccagaccacccagaagggacagaagaacagccgcgagagaatgaagcggatcgaagagggcatcaaagagctgggcagccagatcctgaaagaacaccccgtggaaaacacccagctgcagaacgagaagctgtacctgtactacctgcagaatgggcgggatatgtacgtggaccaggaactggacatcaaccggctgtccgactacgatgtggacgctatcgtgcctcagagctttctgaaggacgactccatcgataacaaagtgctgactcggagcgacaagaaccggggcaagagcgacaacgtgccctccgaagaggtcgtgaagaagatgaagaactactggcgccagctgctgaatgccaagctgattacccagaggaagttcgacaatctgaccaaggccgagagaggcggcctgagcgaactggataaggccggcttcatcaagagacagctggtggaaacccggcagatcacaaagcacgtggcacagatcctggactcccggatgaacactaagtacgacgagaacgacaaactgatccgggaagtgaaagtgatcaccctgaagtccaagctggtgtccgatttccggaaggatttccagttttacaaagtgcgcgagatcaacaactaccaccacgcccacgacgcctacctgaacgccgtcgtgggaaccgccctgatcaaaaagtaccctaagctggaaagcgagttcgtgtacggcgactacaaggtgtacgacgtgcggaagatgatcgccaagagcgagcaggaaatcggcaaggctaccgccaagtacttcttctacagcaacatcatgaactttttcaagaccgagattaccctggccaacggcgagatccggaagcggcctctgatcgagacaaacggcgaaacaggcgagatcgtgtgggataagggccgggactttgccaccgtgcggaaagtgctgtctatgccccaagtgaatatcgtgaaaaagaccgaggtgcagacaggcggcttcagcaaagagtctatcctgcccaagaggaacagcgacaagctgatcgccagaaagaaggactgggaccctaagaagtacggcggcttcgacagccccaccgtggcctattctgtgctggtggtggccaaagtggaaaagggcaagtccaagaaactgaagagtgtgaaagagctgctggggatcaccatcatggaaagaagcagcttcgagaagaatcccatcgactttctggaagccaagggctacaaagaagtgaaaaaggacctgatcatcaagctgcctaagtactccctgttcgagctggaaaacggccggaagagaatgctggcctctgccggcgaactgcagaagggaaacgaactggccctgccctccaaatatgtgaacttcctgtacctggccagccactatgagaagctgaagggctcccccgaggataatgagcagaaacagctgtttgtggaacagcacaaacactacctggacgagatcatcgagcagatcagcgagttctccaagagagtgatcctggccgacgctaatctggacaaggtgctgagcgcctacaacaagcacagagacaagcctatcagagagcaggccgagaatatcatccacctgtttaccctgaccaatctgggagcccctgccgccttcaagtactttgacaccaccatcgaccggaagaggtacaccagcaccaaagaggtgctggacgccaccctgatccaccagagcatcaccggcctgtacgagacacggatcgacctgtctcagctgggaggcgacgcctatccctatgacgtgcccgattatgccagcctgggcagcggctcccccaagaaaaaacgcaaggtggaagatcctaagaaaaagcggaaagtggacggcagcggcagcgagacccccggtaccagcgagagcgccacccccgagagccggacactcgccaagaccgtggcctatttctacgaccccgacgtgggcaacttccactacggagctggacaccctatgaagccccatcgcctggcattgacccatagcctggtcctgcattacggtctctataagaagatgatcgtcttcaagccataccaggcctcccaacatgacatgtgccgcttccactccgaggactacattgacttcctgcagagagtcagccccaccaatatgcaaggcttcaccaagagtcttaatgccttcaacgtaggcgatgactgcccagtgtttcccgggctctttgagttctgctcgcgttacacaggcgcatctctgcaaggagcaacccagctgaacaacaagatctgtgatattgccattaactgggctggtggtctgcaccatgccaagaagtttgaggcctctggcttctgctatgtcaacgacattgtgattggcatcctggagctgctcaagtaccaccctcgggtgctctacattgacattgacatccaccatggtgacggggttcaagaagctttctacctcactgaccgggtcatgacggtgtccttccacaaatacggaaattacttcttccctggcacaggtgacatgtatgaagtcggggcagagagtggccgctactactgtctgaacgtgcccctgcgggatggcattgatgaccagagttacaagcaccttttccagccggttatcaaccaggtagtggacttctaccaacccacgtgcattgtgctccagtgtggagctgactctctgggctgtgatcgattgggctgctttaacctcagcatccgagggcatggggaatgcgttgaatatgtcaagagcttcaatatccctctactcgtgctgggtggtggtggttatactgtccgaaatgttgcccgctgctggacatatgagacatcgctgctggtagaagaggccattagtgaggagcttccctatagtgaatacttcgagtactttgccccagacttcacacttcatccagatgtcagcacccgcatcgagaatcagaactcacgccagtatctggaccagatccgccagacaatctttgaaaacctgaagatgctgaaccatgcacctagtgtccagattcatgacgtgcctgcagacctcctgacctatgacaggactgatgaggctgatgcagaggagaggggtcctgaggagaactatagcaggccagaggcacccaatgagttctatgatggagaccatgacaatgacaaggaaagcgatgtggagattgagggcagcggctaatga

SEQ ID NO: 246 - DNA, 7731 bp, synthetic construct
  misc_feature 1..7731: note = V61 CDS
  source 1..7731: mol_type = other DNA
atgcctgctgctaagagagtgaaactggatggatccaaccatgaccaggaatttgaccccccaaaggtttacccacctgtgccagctgagaagaggaagcccatccgcgtgctgtctctctttgatgggattgctacagggctcctggtgctgaaggacctgggcatccaagtggaccgctacattgcctccgaggtgtgtgaggactccatcacggtgggcatggtgcggcaccagggaaagatcatgtacgtcggggacgtccgcagcgtcacacagaagcatatccaggagtggggcccattcgacctggtgattggaggcagtccctgcaatgacctctccattgtcaaccctgcccgcaagggactttatgagggtactggccgcctcttctttgagttctaccgcctcctgcatgatgcgcggcccaaggagggagatgatcgccccttcttctggctctttgagaatgtggtggccatgggcgttagtgacaagagggacatctcgcgatttcttgagtctaaccccgtgatgattgacgccaaagaagtgtctgctgcacacagggcccgttacttctggggtaaccttcctggcatgaacaggcctttggcatccactgtgaatgataagctggagctgcaagagtgtctggagcacggcagaatagccaagttcagcaaagtgaggaccattaccaccaggtcaaactctataaagcagggcaaagaccagcatttccccgtgttcatgaacgagaaggaggacatcctgtggtgcactgaaatggaaagggtgtttggcttccccgtccactacacagacgtctccaacatgagccgcttggcgaggcagagactgctgggccgatcgtggagcgtgccggtcatccgccacctcttcgctccgctgaaggaatattttgcttgtgtgtctagcggcaatagtaacgctaacagccgcgggccgagcttcagcagcggcctggtgccgttaagcttgcgcggcagccatatgggccctatggagatatacaagacagtgtctgcatggaagagacagccagtgcgggtactgagcctcttcagaaacatcgacaaggtactaaagagtttgggcttcttggaaagcggttctggttctgggggaggaacgctgaagtacgtggaagatgtcacaaatgtcgtgaggagagacgtggagaaatggggcccctttgacctggtgtacggctcgacgcagcccctaggcagctcttgtgatcgctgtcccggctggtacatgttccagttccaccggatcctgcagtatgcgctgcctcgccaggagagtcagcggcccttcttctggatattcatggacaatctgctgctgactgaggatgaccaagagacaactacccgcttccttcagacagaggctgtgaccctccaggatgtccgtggcagagactaccagaatgctatgcgggtgtggagcaacattccagggctgaagagcaagcatgcgcccctgaccccaaaggaagaagagtatctgcaagcccaagtcagaagcaggagcaagctggacgccccgaaagttgacctcctggtgaagaactgccttctcccgctgagagagtacttcaagtatttttctcaaaactcacttcctcttggagggccgagctctggcgcacccccaccaagtggagggtctcctgccgggtccccaacatctactgaagaaggcaccagcgaatccgcaacgcccgagtcaggccctggtacctccacagaaccatctgaaggtagtgcgcctggttccccagctggaagccctacttccaccgaagaaggcacgtcaaccgaaccaagtgaaggatctgcccctgggaccagcactgaaccatctgagccaaaaaagaagagaaaggtaatggacaagaagtacagcatcggcctggccatcggcaccaactctgtgggctgggccgtgatcaccgacgagtacaaggtgcccagcaagaaattcaaggtgctgggcaacaccgaccggcacagcatcaagaagaacctgatcggcgccctgctgttcgacagcggagaaacagccgaggccacccggctgaagagaaccgccagaagaagatacaccagacggaagaaccggatctgctatctgcaagagatcttcagcaacgagatggccaaggtggacgacagcttcttccacagactggaagagtccttcctggtggaagaggataagaagcacgagcggcaccccatcttcggcaacatcgtggacgaggtggcctaccacgagaagtaccccaccatctaccacctgagaaagaaactggtggacagcaccgacaaggccgacctgcggctgatctatctggccctggcccacatgatcaagttccggggccacttcctgatcgagggcgacctgaaccccgacaacagcgacgtggacaagctgttcatccagctggtgcagacctacaaccagctgttcgaggaaaaccccatcaacgccagcggcgtggacgccaaggccatcctgtctgccagactgagcaagagcagacggctggaaaatctgatcgcccagctgcccggcgagaagaagaatggcctgttcggcaacctgattgccctgagcctgggcctgacccccaacttcaagagcaacttcgacctggccgaggatgccaaactgcagctgagcaaggacacctacgacgacgacctggacaacctgctggcccagatcggcgaccagtacgccgacctgtttctggccgccaagaacctgtccgacgccatcctgctgagcgacatcctgagagtgaacaccgagatcaccaaggcccccctgagcgcctctatgatcaagagatacgacgagcaccaccaggacctgaccctgctgaaagctctcgtgcggcagcagctgcctgagaagtacaaagagattttcttcgaccagagcaagaacggctacgccggctacatcgatggcggagccagccaggaagagttctacaagttcatcaagcccatcctggaaaagatggacggcaccgaggaactgctcgtgaagctgaacagagaggacctgctgcggaagcagcggaccttcgacaacggcagcatcccccaccagatccacctgggagagctgcacgccattctgcggcggcaggaagatttttacccattcctgaaggacaaccgggaaaagatcgagaagatcctgaccttccgcatcccctactacgtgggccctctggccaggggaaacagcagattcgcctggatgaccagaaagagcgaggaaaccatcaccccctggaacttcgaggaagtggtggacaagggcgccagcgcccagagcttcatcgagcggatgaccaacttcgataagaacctgcccaacgagaaggtgctgcccaagcacagcctgctgtacgagtacttcaccgtgtacaacgagctgaccaaagtgaaatacgtgaccgagggaatgagaaagcccgccttcctgagcggcgagcagaaaaaagccatcgtggacctgctgttcaagaccaaccggaaagtgaccgtgaagcagctgaaagaggactacttcaagaaaatcgagtgcttcgactccgtggaaatctccggcgtggaagatcggttcaacgcctccctgggcacataccacgatctgctgaaaattatcaaggacaaggacttcctggacaatgaggaaaacgaggacattctggaagatatcgtgctgaccctgacactgtttgaggacagagagatgatcgaggaacggctgaaaacctatgcccacctgttcgacgacaaagtgatgaagcagctgaagcggcggagatacaccggctggggcaggctgagccggaagctgatcaacggcatccgggacaagcagtccggcaagacaatcctggatttcctgaagtccgacggcttcgccaacagaaacttcatgcagctgatccacgacgacagcctgacctttaaagaggacatccagaaagcccaggtgtccggccagggcgatagcctgcacgagcacattgccaatctggccggcagccccgccattaagaagggcatcctgcagacagtgaaggtggtggacgagctcgtgaaagtgatgggccggcacaagcccgagaacatcgtgatcgaaatggccagagagaaccagaccacccagaagggacagaagaacagccgcgagagaatgaagcggatcgaagagggcatcaaagagctgggcagccagatcctgaaagaacaccccgtggaaaacacccagctgcagaacgagaagctgtacctgtactacctgcagaatgggcgggatatgtacgtggaccaggaactggacatcaaccggctgtccgactacgatgtggacgctatcgtgcctcagagctttctgaaggacgactccatcgataacaaagtgctgactcggagcgacaagaaccggggcaagagcgacaacgtgccctccgaagaggtcgtgaagaagatgaagaactactggcgccagctgctgaatgccaagctgattacccagaggaagttcgacaatctgaccaaggccgagagaggcggcctgagcgaactggataaggccggcttcatcaagagacagctggtggaaacccggcagatcacaaagcacgtggcacagatcctggactcccggatgaacactaagtacgacgagaacgacaaactgatccgggaagtgaaagtgatcaccctgaagtccaagctggtgtccgatttccggaaggatttccagttttacaaagtgcgcgagatcaacaactaccaccacgcccacgacgcctacctgaacgccgtcgtgggaaccgccctgatcaaaaagtaccctaagctggaaagcgagttcgtgtacggcgactacaaggtgtacgacgtgcggaagatgatcgccaagagcgagcaggaaatcggcaaggctaccgccaagtacttcttctacagcaacatcatgaactttttcaagaccgagattaccctggccaacggcgagatccggaagcggcctctgatcgagacaaacggcgaaacaggcgagatcgtgtgggataagggccgggactttgccaccgtgcggaaagtgctgtctatgccccaagtgaatatcgtgaaaaagaccgaggtgcagacaggcggcttcagcaaagagtctatcctgcccaagaggaacagcgacaagctgatcgccagaaagaaggactgggaccctaagaagtacggcggcttcgacagccccaccgtggcctattctgtgctggtggtggccaaagtggaaaagggcaagtccaagaaactgaagagtgtgaaagagctgctggggatcaccatcatggaaagaagcagcttcgagaagaatcccatcgactttctggaagccaagggctacaaagaagtgaaaaaggacctgatcatcaagctgcctaagtactccctgttcgagctggaaaacggccggaagagaatgctggcctctgccggcgaactgcagaagggaaacgaactggccctgccctccaaatatgtgaacttcctgtacctggccagccactatgagaagctgaagggctcccccgaggataatgagcagaaacagctgtttgtggaacagcacaaacactacctggacgagatcatcgagcagatcagcgagttctccaagagagtgatcctggccgacgctaatctggacaaggtgctgagcgcctacaacaagcacagagacaagcctatcagagagcaggccgagaatatcatccacctgtttaccctgaccaatctgggagcccctgccgccttcaagtactttgacaccaccatcgaccggaagaggtacaccagcaccaaagaggtgctggacgccaccctgatccaccagagcatcaccggcctgtacgagacacggatcgacctgtctcagctgggaggcgacgcctatccctatgacgtgcccgattatgccagcctgggcagcggctcccccaagaaaaaacgcaaggtggaagatcctaagaaaaagcggaaagtggacggcagcggcagcgagacccccggtaccagcgagagcgccacccccgagagcatggaccaaatgccaaatctgttcagagggagcaaagcttgcattcatttcatacgctcttctgtcgacgatgttttaagtatgactgcttcctacatcgtaagtgcagttattccttccatgcaacacccaacacatataagaggaagaacacagaaacagctttggacaacaagccttgtggaccacagtgttaccagcatctgccactcctacctaggaactaagtgggtatatattgcctgttggattttggacagaagattcaatgaatggcacctacagaaggagggagctaaggagtttgctgctgctcttactgctgagcgtataaagacaccacctaaacgcccagggggccgcagaagaggaagacttccgaataacagtagcagacccagcacccccaccatcagtgtgctggagtcaaaggatacagacagtgacagagaagcagggactgaaactgggggagagaacaatgataaagaagaagaagagaaaaaagatgagacgtccagctcctctgaagcaaattctcggtgtcaaacaccaataaagatgaagccaaatattgaacctcctgagaatgtggagtggagtggtgctgaagcctccatgtttagagtcctcattggtacttactacgataacttttgtgccattgctaggctaattgggaccaaaacatgtagacaggtgtatgagtttagagtcaaggagtccagtatcatagcacctgttcccactgaggatgtagacactcctccaagaaagaagaaaaggaaacatcggttgtgggctgcacactgcagaaagatacaactgaaaaaggacggctcctctaaccatgtttacaactatcaaccctgtgaccatccacggcagccttgtgacagttcgtgcccttgtgtgatagcacaaaatttttgtgaaaagttttgtcaatgtagttcagagtgtcaaaaccgctttcctggatgtcggtgcaaagcacaatgcaacaccaaacagtgtccatgctacctggctgtccgagagtgtgaccctgacctctgtctcacgtgtggagctgctgaccattgggacagtaaaaatgtatcctgtaagaactgtagcattcagcggggctctaaaaagcacttactgctggcaccgtctgatgtggcaggctggggcatctttatcaaagatcctgtacagaaaaatgaattcatctcagaatactgtggggagattatttctcaggatgaagcagacagaagaggaaaagtgtatgacaaatacatgtgcagctttctgttcaacttgaacaatgattttgtggtggatgcaacccgaaagggcaacaaaattcgttttgctaatcattcagtaaatccaaactgctatgcaaaagttatgatggttaatggtgaccacaggataggcatctttgctaagagggctatccagactggtgaagagttgttttttgattacagatacagccaggctgatgccctgaagtatgtgggcatcgaacgagaaatggaaatcccttgatagtga

SEQ ID NO: 247 - DNA, 8442 bp, synthetic construct
  misc_feature 1..8442: note = V62 CDS
  source 1..8442: mol_type = other DNA
atgcctgctgctaagagagtgaaactggatggatccaaccatgaccaggaatttgaccccccaaaggtttacccacctgtgccagctgagaagaggaagcccatccgcgtgctgtctctctttgatgggattgctacagggctcctggtgctgaaggacctgggcatccaagtggaccgctacattgcctccgaggtgtgtgaggactccatcacggtgggcatggtgcggcaccagggaaagatcatgtacgtcggggacgtccgcagcgtcacacagaagcatatccaggagtggggcccattcgacctggtgattggaggcagtccctgcaatgacctctccattgtcaaccctgcccgcaagggactttatgagggtactggccgcctcttctttgagttctaccgcctcctgcatgatgcgcggcccaaggagggagatgatcgccccttcttctggctctttgagaatgtggtggccatgggcgttagtgacaagagggacatctcgcgatttcttgagtctaaccccgtgatgattgacgccaaagaagtgtctgctgcacacagggcccgttacttctggggtaaccttcctggcatgaacaggcctttggcatccactgtgaatgataagctggagctgcaagagtgtctggagcacggcagaatagccaagttcagcaaagtgaggaccattaccaccaggtcaaactctataaagcagggcaaagaccagcatttccccgtgttcatgaacgagaaggaggacatcctgtggtgcactgaaatggaaagggtgtttggcttccccgtccactacacagacgtctccaacatgagccgcttggcgaggcagagactgctgggccgatcgtggagcgtgccggtcatccgccacctcttcgctccgctgaaggaatattttgcttgtgtgtctagcggcaatagtaacgctaacagccgcgggccgagcttcagcagcggcctggtgccgttaagcttgcgcggcagccatatgggccctatggagatatacaagacagtgtctgcatggaagagacagccagtgcgggtactgagcctcttcagaaacatcgacaaggtactaaagagtttgggcttcttggaaagcggttctggttctgggggaggaacgctgaagtacgtggaagatgtcacaaatgtcgtgaggagagacgtggagaaatggggcccctttgacctggtgtacggctcgacgcagcccctaggcagctcttgtgatcgctgtcccggctggtacatgttccagttccaccggatcctgcagtatgcgctgcctcgccaggagagtcagcggcccttcttctggatattcatggacaatctgctgctgactgaggatgaccaagagacaactacccgcttccttcagacagaggctgtgaccctccaggatgtccgtggcagagactaccagaatgctatgcgggtgtggagcaacattccagggctgaagagcaagcatgcgcccctgaccccaaaggaagaagagtatctgcaagcccaagtcagaagcaggagcaagctggacgccccgaaagttgacctcctggtgaagaactgccttctcccgctgagagagtacttcaagtatttttctcaaaactcacttcctcttggagggccgagctctggcgcacccccaccaagtggagggtctcctgccgggtccccaacatctactgaagaaggcaccagcgaatccgcaacgcccgagtcaggccctggtacctccacagaaccatctgaaggtagtgcgcctggttccccagctggaagccctacttccaccgaagaaggcacgtcaaccgaaccaagtgaaggatctgcccctgggaccagcactgaaccatctgagccaaaaaagaagagaaaggtaatggacaagaagtacagcatcggcctggccatcggcaccaactctgtgggctgggccgtgatcaccgacgagtacaaggtgcccagcaagaaattcaaggtgctgggcaacaccgaccggcacagcatcaagaagaacctgatcggcgccctgctgttcgacagcggagaaacagccgaggccacccggctgaagagaaccgccagaagaagatacaccagacggaagaaccggatctgctatctgcaagagatcttcagcaacgagatggccaaggtggacgacagcttcttccacagactggaagagtccttcctggtggaagaggataagaagcacgagcggcaccccatcttcggcaacatcgtggacgaggtggcctaccacgagaagtaccccaccatctaccacctgagaaagaaactggtggacagcaccgacaaggccgacctgcggctgatctatctggccctggcccacatgatcaagttccggggccacttcctgatcgagggcgacctgaaccccgacaacagcgacgtggacaagctgttcatccagctggtgcagacctacaaccagctgttcgaggaaaaccccatcaacgccagcggcgtggacgccaaggccatcctgtctgccagactgagcaagagcagacggctggaaaatctgatcgcccagctgcccggcgagaagaagaatggcctgttcggcaacctgattgccctgagcctgggcctgacccccaacttcaagagcaacttcgacctggccgaggatgccaaactgcagctgagcaaggacacctacgacgacgacctggacaacctgctggcccagatcggcgaccagtacgccgacctgtttctggccgccaagaacctgtccgacgccatcctgctgagcgacatcctgagagtgaacaccgagatcaccaaggcccccctgagcgcctctatgatcaagagatacgacgagcaccaccaggacctgaccctgctgaaagctctcgtgcggcagcagctgcctgagaagtacaaagagattttcttcgaccagagcaagaacggctacgccggctacatcgatggcggagccagccaggaagagttctacaagttcatcaagcccatcctggaaaagatggacggcaccgaggaactgctcgtgaagctgaacagagaggacctgctgcggaagcagcggaccttcgacaacggcagcatcccccaccagatccacctgggagagctgcacgccattctgcggcggcaggaagatttttacccattcctgaaggacaaccgggaaaagatcgagaagatcctgaccttccgcatcccctactacgtgggccctctggccaggggaaacagcagattcgcctggatgaccagaaagagcgaggaaaccatcaccccctggaacttcgaggaagtggtggacaagggcgccagcgcccagagcttcatcgagcggatgaccaacttcgataagaacctgcccaacgagaaggtgctgcccaagcacagcctgctgtacgagtacttcaccgtgtacaacgagctgaccaaagtgaaatacgtgaccgagggaatgagaaagcccgccttcctgagcggcgagcagaaaaaagccatcgtggacctgctgttcaagaccaaccggaaagtgaccgtgaagcagctgaaagaggactacttcaagaaaatcgagtgcttcgactccgtggaaatctccggcgtggaagatcggttcaacgcctccctgggcacataccacgatctgctgaaaattatcaaggacaaggacttcctggacaatgaggaaaacgaggacattctggaagatatcgtgctgaccctgacactgtttgaggacagagagatgatcgaggaacggctgaaaacctatgcccacctgttcgacgacaaagtgatgaagcagctgaagcggcggagatacaccggctggggcaggctgagccggaagctgatcaacggcatccgggacaagcagtccggcaagacaatcctggatttcctgaagtccgacggcttcgccaacagaaacttcatgcagctgatccacgacgacagcctgacctttaaagaggacatccagaaagcccaggtgtccggccagggcgatagcctgcacgagcacattgccaatctggccggcagccccgccattaagaagggcatcctgcagacagtgaaggtggtggacgagctcgtgaaagtgatgggccggcacaagcccgagaacatcgtgatcgaaatggccagagagaaccagaccacccagaagggacagaagaacagccgcgagagaatgaagcggatcgaagagggcatcaaagagctgggcagccagatcctgaaagaacaccccgtggaaaacacccagctgcagaacgagaagctgtacctgtactacctgcagaatgggcgggatatgtacgtggaccaggaactggacatcaaccggctgtccgactacgatgtggacgctatcgtgcctcagagctttctgaaggacgactccatcgataacaaagtgctgactcggagcgacaagaaccggggcaagagcgacaacgtgccctccgaagaggtcgtgaagaagatgaagaactactggcgccagctgctgaatgccaagctgattacccagaggaagttcgacaatctgaccaaggccgagagaggcggcctgagcgaactggataaggccggcttcatcaagagacagctggtggaaacccggcagatcacaaagcacgtggcacagatcctggactcccggatgaacactaagtacgacgagaacgacaaactgatccgggaagtgaaagtgatcaccctgaagtccaagctggtgtccgatttccggaaggatttccagttttacaaagtgcgcgagatcaacaactaccaccacgcccacgacgcctacctgaacgccgtcgtgggaaccgccctgatcaaaaagtaccctaagctggaaagcgagttcgtgtacggcgactacaaggtgtacgacgtgcggaagatgatcgccaagagcgagcaggaaatcggcaaggctaccgccaagtacttcttctacagcaacatcatgaactttttcaagaccgagattaccctggccaacggcgagatccggaagcggcctctgatcgagacaaacggcgaaacaggcgagatcgtgtgggataagggccgggactttgccaccgtgcggaaagtgctgtctatgccccaagtgaatatcgtgaaaaagaccgaggtgcagacaggcggcttcagcaaagagtctatcctgcccaagaggaacagcgacaagctgatcgccagaaagaaggactgggaccctaagaagtacggcggcttcgacagccccaccgtggcctattctgtgctggtggtggccaaagtggaaaagggcaagtccaagaaactgaagagtgtgaaagagctgctggggatcaccatcatggaaagaagcagcttcgagaagaatcccatcgactttctggaagccaagggctacaaagaagtgaaaaaggacctgatcatcaagctgcctaagtactccctgttcgagctggaaaacggccggaagagaatgctggcctctgccggcgaactgcagaagggaaacgaactggccctgccctccaaatatgtgaacttcctgtacctggccagccactatgagaagctgaagggctcccccgaggataatgagcagaaacagctgtttgtggaacagcacaaacactacctggacgagatcatcgagcagatcagcgagttctccaagagagtgatcctggccgacgctaatctggacaaggtgctgagcgcctacaacaagcacagagacaagcctatcagagagcaggccgagaatatcatccacctgtttaccctgaccaatctgggagcccctgccgccttcaagtactttgacaccaccatcgaccggaagaggtacaccagcaccaaagaggtgctggacgccaccctgatccaccagagcatcaccggcctgtacgagacacggatcgacctgtctcagctgggaggcgacgcctatccctatgacgtgcccgattatgccagcctgggcagcggctcccccaagaaaaaacgcaaggtggaagatcctaagaaaaagcggaaagtggacggcagcggcagcgagacccccggtaccagcgagagcgccacccccgagagccggacactcggccagactgggaagaaatctgagaagggaccagtttgttggcggaagcgtgtaaaatcagagtacatgcgactgagacagctcaagaggttcagacgagctgatgaagtaaagagtatgtttagttccaatcgtcagaaaattttggaaagaacggaaatcttaaaccaagaatggaaacagcgaaggatacagcctgtgcacatcctgacttctgtgagctcattgcgcgggactagggagtgttcggtgaccagtgacttggattttccaacacaagtcatcccattaaagactctgaatgcagttgcttcagtacccataatgtattcttggtctcccctacagcagaattttatggtggaagatgaaactgttttacataacattccttatatgggagatgaagttttagatcaggatggtactttcattgaagaactaataaaaaattatgatgggaaagtacacggggatagagaatgtgggtttataaatgatgaaatttttgtggagttggtgaatgcccttggtcaatataatgatgatgacgatgatgatgatggagacgatcctgaagaaagagaagaaaagcagaaagatctggaggatcaccgagatgataaagaaagccgcccacctcggaaatttccttctgataaaatttttgaagccatttcctcaatgtttccagataagggcacagcagaagaactaaaggaaaaatataaagaactcaccgaacagcagctcccaggcgcacttcctcctgaatgtacccccaacatagatggaccaaatgctaaatctgttcagagagagcaaagcttacactcctttcatacgcttttctgtaggcgatgttttaaatatgactgcttcctacatccttttcatgcaacacccaacacttataagcggaagaacacagaaacagctctagacaacaaaccttgtggaccacagtgttaccagcatttggagggagcaaaggagtttgctgctgctctcaccgctgagcggataaagaccccaccaaaacgtccaggaggccgcagaagaggacggcttcccaataacagtagcaggcccagcacccccaccattaatgtgctggaatcaaaggatacagacagtgatagggaagcagggactgaaacggggggagagaacaatgataaagaagaagaagagaagaaagatgaaacttcgagctcctctgaagcaaattctcggtgtcaaacaccaataaagatgaagccaaatattgaacctcctgagaatgtggagtggagtggtgctgaagcctcaatgtttagagtcctcattggcacttactatgacaatttctgtgccattgctaggttaattgggaccaaaacatgtagacaggtgtatgagtttagagtcaaagaatctagcatcatagctccagctcccgctgaggatgtggatactcctccaaggaaaaagaagaggaaacaccggttgtgggctgcacactgcagaaagatacagctgaaaaaggacggctcctctaaccatgtttacaactatcaaccctgtgatcatccacggcagccttgtgacagttcgtgcccttgtgtgatagcacaaaatttttgtgaaaagttttgtcaatgtagttcagagtgtcaaaaccgctttccgggatgccgctgcaaagcacagtgcaacaccaagcagtgcccgtgctacctggctgtccgagagtgtgaccctgacctctgtcttacttgtggagccgctgaccattgggacagtaaaaatgtgtcctgcaagaactgcagtattcagcggggctccaaaaagcatctattgctggcaccatctgacgtggcaggctgggggatttttatcaaagatcctgtgcagaaaaatgaattcatctcagaatactgtggagagattatttctcaagatgaagctgacagaagagggaaagtgtatgataaatacatgtgcagctttctgttcaacttgaacaatgattttgtggtggatgcaacccgcaagggtaacaaaattcgttttgcaaatcattcggtaaatccaaactgctatgcaaaagttatgatggttaacggtgatcacaggataggtatttttgccaagagagccatccagactggcgaagagctgttttttgattacagatacagccaggctgatgccctgaagtatgtcggcatcgaaagagaaatggaaatccctgagggcagcggctaatga

SEQ ID NO: 248 - DNA, 6999 bp, synthetic construct
  misc_feature 1..6999: note = V63 CDS
  source 1..6999: mol_type = other DNA
atgcctgctgctaagagagtgaaactggatggatccaaccatgaccaggaatttgaccccccaaaggtttacccacctgtgccagctgagaagaggaagcccatccgcgtgctgtctctctttgatgggattgctacagggctcctggtgctgaaggacctgggcatccaagtggaccgctacattgcctccgaggtgtgtgaggactccatcacggtgggcatggtgcggcaccagggaaagatcatgtacgtcggggacgtccgcagcgtcacacagaagcatatccaggagtggggcccattcgacctggtgattggaggcagtccctgcaatgacctctccattgtcaaccctgcccgcaagggactttatgagggtactggccgcctcttctttgagttctaccgcctcctgcatgatgcgcggcccaaggagggagatgatcgccccttcttctggctctttgagaatgtggtggccatgggcgttagtgacaagagggacatctcgcgatttcttgagtctaaccccgtgatgattgacgccaaagaagtgtctgctgcacacagggcccgttacttctggggtaaccttcctggcatgaacaggcctttggcatccactgtgaatgataagctggagctgcaagagtgtctggagcacggcagaatagccaagttcagcaaagtgaggaccattaccaccaggtcaaactctataaagcagggcaaagaccagcatttccccgtgttcatgaacgagaaggaggacatcctgtggtgcactgaaatggaaagggtgtttggcttccccgtccactacacagacgtctccaacatgagccgcttggcgaggcagagactgctgggccgatcgtggagcgtgccggtcatccgccacctcttcgctccgctgaaggaatattttgcttgtgtgtctagcggcaatagtaacgctaacagccgcgggccgagcttcagcagcggcctggtgccgttaagcttgcgcggcagccatatgggccctatggagatatacaagacagtgtctgcatggaagagacagccagtgcgggtactgagcctcttcagaaacatcgacaaggtactaaagagtttgggcttcttggaaagcggttctggttctgggggaggaacgctgaagtacgtggaagatgtcacaaatgtcgtgaggagagacgtggagaaatggggcccctttgacctggtgtacggctcgacgcagcccctaggcagctcttgtgatcgctgtcccggctggtacatgttccagttccaccggatcctgcagtatgcgctgcctcgccaggagagtcagcggcccttcttctggatattcatggacaatctgctgctgactgaggatgaccaagagacaactacccgcttccttcagacagaggctgtgaccctccaggatgtccgtggcagagactaccagaatgctatgcgggtgtggagcaacattccagggctgaagagcaagcatgcgcccctgaccccaaaggaagaagagtatctgcaagcccaagtcagaagcaggagcaagctggacgccccgaaagttgacctcctggtgaagaactgccttctcccgctgagagagtacttcaagtatttttctcaaaactcacttcctcttggagggccgagctctggcgcacccccaccaagtggagggtctcctgccgggtccccaacatctactgaagaaggcaccagcgaatccgcaacgcccgagtcaggccctggtacctccacagaaccatctgaaggtagtgcgcctggttccccagctggaagccctacttccaccgaagaaggcacgtcaaccgaaccaagtgaaggatctgcccctgggaccagcactgaaccatctgagccaaaaaagaagagaaaggtaatggacaagaagtacagcatcggcctggccatcggcaccaactctgtgggctgggccgtgatcaccgacgagtacaaggtgcccagcaagaaattcaaggtgctgggcaacaccgaccggcacagcatcaagaagaacctgatcggcgccctgctgttcgacagcggagaaacagccgaggccacccggctgaagagaaccgccagaagaagatacaccagacggaagaaccggatctgctatctgcaagagatcttcagcaacgagatggccaaggtggacgacagcttcttccacagactggaagagtccttcctggtggaagaggataagaagcacgagcggcaccccatcttcggcaacatcgtggacgaggtggcctaccacgagaagtaccccaccatctaccacctgagaaagaaactggtggacagcaccgacaaggccgacctgcggctgatctatctggccctggcccacatgatcaagttccggggccacttcctgatcgagggcgacctgaaccccgacaacagcgacgtggacaagctgttcatccagctggtgcagacctacaaccagctgttcgaggaaaaccccatcaacgccagcggcgtggacgccaaggccatcctgtctgccagactgagcaagagcagacggctggaaaatctgatcgcccagctgcccggcgagaagaagaatggcctgttcggcaacctgattgccctgagcctgggcctgacccccaacttcaagagcaacttcgacctggccgaggatgccaaactgcagctgagcaaggacacctacgacgacgacctggacaacctgctggcccagatcggcgaccagtacgccgacctgtttctggccgccaagaacctgtccgacgccatcctgctgagcgacatcctgagagtgaacaccgagatcaccaaggcccccctgagcgcctctatgatcaagagatacgacgagcaccaccaggacctgaccctgctgaaagctctcgtgcggcagcagctgcctgagaagtacaaagagattttcttcgaccagagcaagaacggctacgccggctacatcgatggcggagccagccaggaagagttctacaagttcatcaagcccatcctggaaaagatggacggcaccgaggaactgctcgtgaagctgaacagagaggacctgctgcggaagcagcggaccttcgacaacggcagcatcccccaccagatccacctgggagagctgcacgccattctgcggcggcaggaagatttttacccattcctgaaggacaaccgggaaaagatcgagaagatcctgaccttccgcatcccctactacgtgggccctctggccaggggaaacagcagattcgcctggatgaccagaaagagcgaggaaaccatcaccccctggaacttcgaggaagtggtggacaagggcgccagcgcccagagcttcatcgagcggatgaccaacttcgataagaacctgcccaacgagaaggtgctgcccaagcacagcctgctgtacgagtacttcaccgtgtacaacgagctgaccaaagtgaaatacgtgaccgagggaatgagaaagcccgccttcctgagcggcgagcagaaaaaagccatcgtggacctgctgttcaagaccaaccggaaagtgaccgtgaagcagctgaaagaggactacttcaagaaaatcgagtgcttcgactccgtggaaatctccggcgtggaagatcggttcaacgcctccctgggcacataccacgatctgctgaaaattatcaaggacaaggacttcctggacaatgaggaaaacgaggacattctggaagatatcgtgctgaccctgacactgtttgaggacagagagatgatcgaggaacggctgaaaacctatgcccacctgttcgacgacaaagtgatgaagcagctgaagcggcggagatacaccggctggggcaggctgagccggaagctgatcaacggcatccgggacaagcagtccggcaagacaatcctggatttcctgaagtccgacggcttcgccaacagaaacttcatgcagctgatccacgacgacagcctgacctttaaagaggacatccagaaagcccaggtgtccggccagggcgatagcctgcacgagcacattgccaatctggccggcagccccgccattaagaagggcatcctgcagacagtgaaggtggtggacgagctcgtgaaagtgatgggccggcacaagcccgagaacatcgtgatcgaaatggccagagagaaccagaccacccagaagggacagaagaacagccgcgagagaatgaagcggatcgaagagggcatcaaagagctgggcagccagatcctgaaagaacaccccgtggaaaacacccagctgcagaacgagaagctgtacctgtactacctgcagaatgggcgggatatgtacgtggaccaggaactggacatcaaccggctgtccgactacgatgtggacgctatcgtgcctcagagctttctgaaggacgactccatcgataacaaagtgctgactcggagcgacaagaaccggggcaagagcgacaacgtgccctccgaagaggtcgtgaagaagatgaagaactactggcgccagctgctgaatgccaagctgattacccagaggaagttcgacaatctgaccaaggccgagagaggcggcctgagcgaactggataaggccggcttcatcaagagacagctggtggaaacccggcagatcacaaagcacgtggcacagatcctggactcccggatgaacactaagtacgacgagaacgacaaactgatccgggaagtgaaagtgatcaccctgaagtccaagctggtgtccgatttccggaaggatttccagttttacaaagtgcgcgagatcaacaactaccaccacgcccacgacgcctacctgaacgccgtcgtgggaaccgccctgatcaaaaagtaccctaagctggaaagcgagttcgtgtacggcgactacaaggtgtacgacgtgcggaagatgatcgccaagagcgagcaggaaatcggcaaggctaccgccaagtacttcttctacagcaacatcatgaactttttcaagaccgagattaccctggccaacggcgagatccggaagcggcctctgatcgagacaaacggcgaaacaggcgagatcgtgtgggataagggccgggactttgccaccgtgcggaaagtgctgtctatgccccaagtgaatatcgtgaaaaagaccgaggtgcagacaggcggcttcagcaaagagtctatcctgcccaagaggaacagcgacaagctgatcgccagaaagaaggactgggaccctaagaagtacggcggcttcgacagccccaccgtggcctattctgtgctggtggtggccaaagtggaaaagggcaagtccaagaaactgaagagtgtgaaagagctgctggggatcaccatcatggaaagaagcagcttcgagaagaatcccatcgactttctggaagccaagggctacaaagaagtgaaaaaggacctgatcatcaagctgcctaagtactccctgttcgagctggaaaacggccggaagagaatgctggcctctgccggcgaactgcagaagggaaacgaactggccctgccctccaaatatgtgaacttcctgtacctggccagccactatgagaagctgaagggctcccccgaggataatgagcagaaacagctgtttgtggaacagcacaaacactacctggacgagatcatcgagcagatcagcgagttctccaagagagtgatcctggccgacgctaatctggacaaggtgctgagcgcctacaacaagcacagagacaagcctatcagagagcaggccgagaatatcatccacctgtttaccctgaccaatctgggagcccctgccgccttcaagtactttgacaccaccatcgaccggaagaggtacaccagcaccaaagaggtgctggacgccaccctgatccaccagagcatcaccggcctgtacgagacacggatcgacctgtctcagctgggaggcgacgcctatccctatgacgtgcccgattatgccagcctgggcagcggctcccccaagaaaaaacgcaaggtggaagatcctaagaaaaagcggaaagtggacggcagcggcagcgagacccccggtaccagcgagagcgccacccccgagagccggacactcgaggatgtggatactcctccaaggaaaaagaagaggaaacaccggttgtgggctgcacactgcagaaagatacagctgaaaaaggacggctcctctaaccatgtttacaactatcaaccctgtgatcatccacggcagccttgtgacagttcgtgcccttgtgtgatagcacaaaatttttgtgaaaagttttgtcaatgtagttcagagtgtcaaaaccgctttccgggatgccgctgcaaagcacagtgcaacaccaagcagtgcccgtgctacctggctgtccgagagtgtgaccctgacctctgtcttacttgtggagccgctgaccattgggacagtaaaaatgtgtcctgcaagaactgcagtattcagcggggctccaaaaagcatctattgctggcaccatctgacgtggcaggctgggggatttttatcaaagatcctgtgcagaaaaatgaattcatctcagaatactgtggagagattatttctcaagatgaagctgacagaagagggaaagtgtatgataaatacatgtgcagctttctgttcaacttgaacaatgattttgtggtggatgcaacccgcaagggtaacaaaattcgttttgcaaatcattcggtaaatccaaactgctatgcaaaagttatgatggttaacggtgatcacaggataggtatttttgccaagagagccatccagactggcgaagagctgttttttgattacagatacagccaggctgatgccctgaagtatgtcggcatcgaaagagaaatggaaatccctgagggcagcggctaatga

SEQ ID NO: 249 - DNA, 7488 bp, synthetic construct
  misc_feature 1..7488: note = V64 CDS
  source 1..7488: mol_type = other DNA
atgcctgctgctaagagagtgaaactggatggatccaaccatgaccaggaatttgaccccccaaaggtttacccacctgtgccagctgagaagaggaagcccatccgcgtgctgtctctctttgatgggattgctacagggctcctggtgctgaaggacctgggcatccaagtggaccgctacattgcctccgaggtgtgtgaggactccatcacggtgggcatggtgcggcaccagggaaagatcatgtacgtcggggacgtccgcagcgtcacacagaagcatatccaggagtggggcccattcgacctggtgattggaggcagtccctgcaatgacctctccattgtcaaccctgcccgcaagggactttatgagggtactggccgcctcttctttgagttctaccgcctcctgcatgatgcgcggcccaaggagggagatgatcgccccttcttctggctctttgagaatgtggtggccatgggcgttagtgacaagagggacatctcgcgatttcttgagtctaaccccgtgatgattgacgccaaagaagtgtctgctgcacacagggcccgttacttctggggtaaccttcctggcatgaacaggcctttggcatccactgtgaatgataagctggagctgcaagagtgtctggagcacggcagaatagccaagttcagcaaagtgaggaccattaccaccaggtcaaactctataaagcagggcaaagaccagcatttccccgtcttcatgaacgagaaggaggacatcctgtggtgcactgaaatggaaagggtgtttggcttccccgtccactacacagacgtctccaacatgagccgcttggcgaggcagagactgctgggccgatcgtggagcgtgccggtcatccgccacctcttcgctccgctgaaggaatattttgcttgtgtgtctagcggcaatagtaacgctaacagccgcgggccgagcttcagcagcggcctggtgccgttaagcttgcgcggcagccatatgggccctatggagatatacaagacagtgtctgcatggaagagacagccagtgcgggtactgagcctcttcagaaacatcgacaaggtactaaagagtttgggcttcttggaaagcggttctggttctgggggaggaacgctgaagtacgtggaagatgtcacaaatgtcgtgaggagagacgtggagaaatggggcccctttgacctggtgtacggctcgacgcagcccctaggcagctcttgtgatcgctgtcccggctggtacatgttccagttccaccggatcctgcagtatgcgctgcctcgccaggagagtcagcggcccttcttctggatattcatggacaatctgctgctgactgaggatgaccaagagacaactacccgcttccttcagacagaggctgtgaccctccaggatgtccgtggcagagactaccagaatgctatgcgggtgtggagcaacattccagggctgaagagcaagcatgcgcccctgaccccaaaggaagaagagtatctgcaagcccaagtcagaagcaggagcaagctggacgccccgaaagttgacctcctggtgaagaactgccttctcccgctgagagagtacttcaagtatttttctcaaaactcacttcctcttggagggccgagctctggcgcacccccaccaagtggagggtctcctgccgggtccccaacatctactgaagaaggcaccagcgaatccgcaacgcccgagtcaggccctggtacctccacagaaccatctgaaggtagtgcgcctggttccccagctggaagccctacttccaccgaagaaggcacgtcaaccgaaccaagtgaaggatctgcccctgggaccagcactgaaccatctgagccaaaaaagaagagaaaggtaatggacaagaagtacagcatcggcctggccatcggcaccaactctgtgggctgggccgtgatcaccgacgagtacaaggtgcccagcaagaaattcaaggtgctgggcaacaccgaccggcacagcatcaagaagaacctgatcggcgccctgctgttcgacagcggagaaacagccgaggccacccggctgaagagaaccgccagaagaagatacaccagacggaagaaccggatctgctatctgcaagagatcttcagcaacgagatggccaaggtggacgacagcttcttccacagactggaagagtccttcctggtggaagaggataagaagcacgagcggcaccccatcttcggcaacatcgtggacgaggtggcctaccacgagaagtaccccaccatctaccacctgagaaagaaactggtggacagcaccgacaaggccgacctgcggctgatctatctggccctggcccacatgatcaagttccggggccacttcctgatcgagggcgacctgaaccccgacaacagcgacgtggacaagctgttcatccagctggtgcagacctacaaccagctgttcgaggaaaaccccatcaacgccagcggcgtggacgccaaggccatcctgtctgccagactgagcaagagcagacggctggaaaatctgatcgcccagctgcccggcgagaagaagaatggcctgttcggcaacctgattgccctgagcctgggcctgacccccaacttcaagagcaacttcgacctggccgaggatgccaaactgcagctgagcaaggacacctacgacgacgacctggacaacctgctggcccagatcggcgaccagtacgccgacctgtttctggccgccaagaacctgtccgacgccatcctgctgagcgacatcctgagagtgaacaccgagatcaccaaggcccccctgagcgcctctatgatcaagagatacgacgagcaccaccaggacctgaccctgctgaaagctctcgtgcggcagcagctgcctgagaagtacaaagagattttcttcgaccagagcaagaacggctacgccggctacatcgatggcggagccagccaggaagagttctacaagttcatcaagcccatcctggaaaagatggacggcaccgaggaactgctcgtgaagctgaacagagaggacctgctgcggaagcagcggaccttcgacaacggcagcatcccccaccagatccacctgggagagctgcacgccattctgcggcggcaggaagatttttacccattcctgaaggacaaccgggaaaagatcgagaagatcctgaccttccgcatcccctactacgtgggccctctggccaggggaaacagcagattcgcctggatgaccagaaagagcgaggaaaccatcaccccctggaacttcgaggaagtggtggacaagggcgccagcgcccagagcttcatcgagcggatgaccaacttcgataagaacctgcccaacgagaaggtgctgcccaagcacagcctgctgtacgagtacttcaccgtgtacaacgagctgaccaaagtgaaatacgtgaccgagggaatgagaaagcccgccttcctgagcggcgagcagaaaaaagccatcgtggacctgctgttcaagaccaaccggaaagtgaccgtgaagcagctgaaagaggactacttcaagaaaatcgagtgcttcgactccgtggaaatctccggcgtggaagatcggttcaacgcctccctgggcacataccacgatctgctgaaaattatcaaggacaaggacttcctggacaatgaggaaaacgaggacattctggaagatatcgtgctgaccctgacactgtttgaggacagagagatgatcgaggaacggctgaaaacctatgcccacctgttcgacgacaaagtgatgaagcagctgaagcggcggagatacaccggctggggcaggctgagccggaagctgatcaacggcatccgggacaagcagtccggcaagacaatcctggatttcctgaagtccgacggcttcgccaacagaaacttcatgcagctgatccacgacgacagcctgacctttaaagaggacatccagaaagcccaggtgtccggccagggcgatagcctgcacgagcacattgccaatctggccggcagccccgccattaagaagggcatcctgcagacagtgaaggtggtggacgagctcgtgaaagtgatgggccggcacaagcccgagaacatcgtgatcgaaatggccagagagaaccagaccacccagaagggacagaagaacagccgcgagagaatgaagcggatcgaagagggcatcaaagagctgggcagccagatcctgaaagaacaccccgtggaaaacacccagctgcagaacgagaagctgtacctgtactacctgcagaatgggcgggatatgtacgtggaccaggaactggacatcaaccggctgtccgactacgatgtggacgctatcgtgcctcagagctttctgaaggacgactccatcgataacaaagtgctgactcggagcgacaagaaccggggcaagagcgacaacgtgccctccgaagaggtcgtgaagaagatgaagaactactggcgccagctgctgaatgccaagctgattacccagaggaagttcgacaatctgaccaaggccgagagaggcggcctgagcgaactggataaggccggcttcatcaagagacagctggtggaaacccggcagatcacaaagcacgtggcacagatcctggactcccggatgaacactaagtacgacgagaacgacaaactgatccgggaagtgaaagtgatcaccctgaagtccaagctggtgtccgatttccggaaggatttccagttttacaaagtgcgcgagatcaacaactaccaccacgcccacgacgcctacctgaacgccgtcgtgggaaccgccctgatcaaaaagtaccctaagctggaaagcgagttcgtgtacggcgactacaaggtgtacgacgtgcggaagatgatcgccaagagcgagcaggaaatcggcaaggctaccgccaagtacttcttctacagcaacatcatgaactttttcaagaccgagattaccctggccaacggcgagatccggaagcggcctctgatcgagacaaacggcgaaacaggcgagatcgtgtgggataagggccgggactttgccaccgtgcggaaagtgctgtctatgccccaagtgaatatcgtgaaaaagaccgaggtgcagacaggcggcttcagcaaagagtctatcctgcccaagaggaacagcgacaagctgatcgccagaaagaaggactgggaccctaagaagtacggcggcttcgacagccccaccgtggcctattctgtgctggtggtggccaaagtggaaaagggcaagtccaagaaactgaagagtgtgaaagagctgctggggatcaccatcatggaaagaagcagcttcgagaagaatcccatcgactttctggaagccaagggctacaaagaagtgaaaaaggacctgatcatcaagctgcctaagtactccctgttcgagctggaaaacggccggaagagaatgctggcctctgccggcgaactgcagaagggaaacgaactggccctgccctccaaatatgtgaacttcctgtacctggccagccactatgagaagctgaagggctcccccgaggataatgagcagaaacagctgtttgtggaacagcacaaacactacctggacgagatcatcgagcagatcagcgagttctccaagagagtgatcctggccgacgctaatctggacaaggtgctgagcgcctacaacaagcacagagacaagcctatcagagagcaggccgagaatatcatccacctgtttaccctgaccaatctgggagcccctgccgccttcaagtactttgacaccaccatcgaccggaagaggtacaccagcaccaaagaggtgctggacgccaccctgatccaccagagcatcaccggcctgtacgagacacggatcgacctgtctcagctgggaggcgacgcctatccctatgacgtgcccgattatgccagcctgggcagcggctcccccaagaaaaaacgcaaggtggaagatcctaagaaaaagcggaaagtggacggcagcggcagcgagacccccggtaccagcgagagcgccacccccgagagccggacactcgccaagaccgtggcctatttctacgaccccgacgtgggcaacttccactacggagctggacaccctatgaagccccatcgcctggcattgacccatagcctggtcctgcattacggtctctataagaagatgatcgtcttcaagccataccaggcctcccaacatgacatgtgccgcttccactccgaggactacattgacttcctgcagagagtcagccccaccaatatgcaaggcttcaccaagagtcttaatgccttcaacgtaggcgatgactgcccagtgtttcccgggctctttgagttctgctcgcgttacacaggcgcatctctgcaaggagcaacccagctgaacaacaagatctgtgatattgccattaactgggctggtggtctgcaccatgccaagaagtttgaggcctctggcttctgctatgtcaacgacattgtgattggcatcctggagctgctcaagtaccaccctcgggtgctctacattgacattgacatccaccatggtgacggggttcaagaagctttctacctcactgaccgggtcatgacggtgtccttccacaaatacggaaattacttcttccctggcacaggtgacatgtatgaagtcggggcagagagtggccgctactactgtctgaacgtgcccctgcgggatggcattgatgaccagagttacaagcaccttttccagccggttatcaaccaggtagtggacttctaccaacccacgtgcattgtgctccagtgtggagctgactctctgggctgtgatcgattgggctgctttaacctcagcatccgagggcatggggaatgcgttgaatatgtcaagagcttcaatatccctctactcgtgctgggtggtggtggttatactgtccgaaatgttgcccgctgctggacatatgagacatcgctgctggtagaagaggccattagtgaggagcttccctatagtgaatacttcgagtactttgccccagacttcacacttcatccagatgtcagcacccgcatcgagaatcagaactcacgccagtatctggaccagatccgccagacaatctttgaaaacctgaagatgctgaaccatgcacctagtgtccagattcatgacgtgcctgcagacctcctgacctatgacaggactgatgaggctgatgcagaggagaggggtcctgaggagaactatagcaggccagaggcacccaatgagttctatgatggagaccatgacaatgacaaggaaagcgatgtggagattgagggcagcggctaatga

SEQ ID NO: 250 - DNA, 7152 bp, synthetic construct
  misc_feature 1..7152: note = V65 CDS
  source 1..7152: mol_type = other DNA
atgcctgctgctaagagagtgaaactggatggatccaaccatgaccaggaatttgaccccccaaaggtttacccacctgtgccagctgagaagaggaagcccatccgcgtgctgtctctctttgatgggattgctacagggctcctggtgctgaaggacctgggcatccaagtggaccgctacattgcctccgaggtgtgtgaggactccatcacggtgggcatggtgcggcaccagggaaagatcatgtacgtcggggacgtccgcagcgtcacacagaagcatatccaggagtggggcccattcgacctggtgattggaggcagtccctgcaatgacctctccattgtcaaccctgcccgcaagggactttatgagggtactggccgcctcttctttgagttctaccgcctcctgcatgatgcgcggcccaaggagggagatgatcgccccttcttctggctctttgagaatgtggtggccatgggcgttagtgacaagagggacatctcgcgatttcttgagtctaaccccgtgatgattgacgccaaagaagtgtctgctgcacacagggcccgttacttctggggtaaccttcctggcatgaacaggcctttggcatccactgtgaatgataagctggagctgcaagagtgtctggagcacggcagaatagccaagttcagcaaagtgaggaccattaccaccaggtcaaactctataaagcagggcaaagaccagcatttccccgtcttcatgaacgagaaggaggacatcctgtggtgcactgaaatggaaagggtgtttggcttccccgtccactacacagacgtctccaacatgagccgcttggcgaggcagagactgctgggccgatcgtggagcgtgccggtcatccgccacctcttcgctccgctgaaggaatattttgcttgtgtgtctagcggcaatagtaacgctaacagccgcgggccgagcttcagcagcggcctggtgccgttaagcttgcgcggcagccatatgggccctatggagatatacaagacagtgtctgcatggaagagacagccagtgcgggtactgagcctcttcagaaacatcgacaaggtactaaagagtttgggcttcttggaaagcggttctggttctgggggaggaacgctgaagtacgtggaagatgtcacaaatgtcgtgaggagagacgtggagaaatggggcccctttgacctggtgtacggctcgacgcagcccctaggcagctcttgtgatcgctgtcccggctggtacatgttccagttccaccggatcctgcagtatgcgctgcctcgccaggagagtcagcggcccttcttctggatattcatggacaatctgctgctgactgaggatgaccaagagacaactacccgcttccttcagacagaggctgtgaccctccaggatgtccgtggcagagactaccagaatgctatgcgggtgtggagcaacattccagggctgaagagcaagcatgcgcccctgaccccaaaggaagaagagtatctgcaagcccaagtcagaagcaggagcaagctggacgccccgaaagttgacctcctggtgaagaactgccttctcccgctgagagagtacttcaagtatttttctcaaaactcacttcctcttggagggccgagctctggcgcacccccaccaagtggagggtctcctgccgggtccccaacatctactgaagaaggcaccagcgaatccgcaacgcccgagtcaggccctggtacctccacagaaccatctgaaggtagtgcgcctggttccccagctggaagccctacttccaccgaagaaggcacgtcaaccgaaccaagtgaaggatctgcccctgggaccagcactgaaccatctgagccaaaaaagaagagaaaggtaatggacaagaagtacagcatcggcctggccatcggcaccaactctgtgggctgggccgtgatcaccgacgagtacaaggtgcccagcaagaaattcaaggtgctgggcaacaccgaccggcacagcatcaagaagaacctgatcggcgccctgctgttcgacagcggagaaacagccgaggccacccggctgaagagaaccgccagaagaagatacaccagacggaagaaccggatctgctatctgcaagagatcttcagcaacgagatggccaaggtggacgacagcttcttccacagactggaagagtccttcctggtggaagaggataagaagcacgagcggcaccccatcttcggcaacatcgtggacgaggtggcctaccacgagaagtaccccaccatctaccacctgagaaagaaactggtggacagcaccgacaaggccgacctgcggctgatctatctggccctggcccacatgatcaagttccggggccacttcctgatcgagggcgacctgaaccccgacaacagcgacgtggacaagctgttcatccagctggtgcagacctacaaccagctgttcgaggaaaaccccatcaacgccagcggcgtggacgccaaggccatcctgtctgccagactgagcaagagcagacggctggaaaatctgatcgcccagctgcccggcgagaagaagaatggcctgttcggcaacctgattgccctgagcctgggcctgacccccaacttcaagagcaacttcgacctggccgaggatgccaaactgcagctgagcaaggacacctacgacgacgacctggacaacctgctggcccagatcggcgaccagtacgccgacctgtttctggccgccaagaacctgtccgacgccatcctgctgagcgacatcctgagagtgaacaccgagatcaccaaggcccccctgagcgcctctatgatcaagagatacgacgagcaccaccaggacctgaccctgctgaaagctctcgtgcggcagcagctgcctgagaagtacaaagagattttcttcgaccagagcaagaacggctacgccggctacatcgatggcggagccagccaggaagagttctacaagttcatcaagcccatcctggaaaagatggacggcaccgaggaactgctcgtgaagctgaacagagaggacctgctgcggaagcagcggaccttcgacaacggcagcatcccccaccagatccacctgggagagctgcacgccattctgcggcggcaggaagatttttacccattcctgaaggacaaccgggaaaagatcgagaagatcctgaccttccgcatcccctactacgtgggccctctggccaggggaaacagcagattcgcctggatgaccagaaagagcgaggaaaccatcaccccctggaacttcgaggaagtggtggacaagggcgccagcgcccagagcttcatcgagcggatgaccaacttcgataagaacctgcccaacgagaaggtgctgcccaagcacagcctgctgtacgagtacttcaccgtgtacaacgagctgaccaaagtgaaatacgtgaccgagggaatgagaaagcccgccttcctgagcggcgagcagaaaaaagccatcgtggacctgctgttcaagaccaaccggaaagtgaccgtgaagcagctgaaagaggactacttcaagaaaatcgagtgcttcgactccgtggaaatctccggcgtggaagatcggttcaacgcctccctgggcacataccacgatctgctgaaaattatcaaggacaaggacttcctggacaatgaggaaaacgaggacattctggaagatatcgtgctgaccctgacactgtttgaggacagagagatgatcgaggaacggctgaaaacctatgcccacctgttcgacgacaaagtgatgaagcagctgaagcggcggagatacaccggctggggcaggctgagccggaagctgatcaacggcatccgggacaagcagtccggcaagacaatcctggatttcctgaagtccgacggcttcgccaacagaaacttcatgcagctgatccacgacgacagcctgacctttaaagaggacatccagaaagcccaggtgtccggccagggcgatagcctgcacgagcacattgccaatctggccggcagccccgccattaagaagggcatcctgcagacagtgaaggtggtggacgagctcgtgaaagtgatgggccggcacaagcccgagaacatcgtgatcgaaatggccagagagaaccagaccacccagaagggacagaagaacagccgcgagagaatgaagcggatcgaagagggcatcaaagagctgggcagccagatcctgaaagaacaccccgtggaaaacacccagctgcagaacgagaagctgtacctgtactacctgcagaatgggcgggatatgtacgtggaccaggaactggacatcaaccggctgtccgactacgatgtggacgctatcgtgcctcagagctttctgaaggacgactccatcgataacaaagtgctgactcggagcgacaagaaccggggcaagagcgacaacgtgccctccgaagaggtcgtgaagaagatgaagaactactggcgccagctgctgaatgccaagctgattacccagaggaagttcgacaatctgaccaaggccgagagaggcggcctgagcgaactggataaggccggcttcatcaagagacagctggtggaaacccggcagatcacaaagcacgtggcacagatcctggactcccggatgaacactaagtacgacgagaacgacaaactgatccgggaagtgaaagtgatcaccctgaagtccaagctggtgtccgatttccggaaggatttccagttttacaaagtgcgcgagatcaacaactaccaccacgcccacgacgcctacctgaacgccgtcgtgggaaccgccctgatcaaaaagtaccctaagctggaaagcgagttcgtgtacggcgactacaaggtgtacgacgtgcggaagatgatcgccaagagcgagcaggaaatcggcaaggctaccgccaagtacttcttctacagcaacatcatgaactttttcaagaccgagattaccctggccaacggcgagatccggaagcggcctctgatcgagacaaacggcgaaacaggcgagatcgtgtgggataagggccgggactttgccaccgtgcggaaagtgctgtctatgccccaagtgaatatcgtgaaaaagaccgaggtgcagacaggcggcttcagcaaagagtctatcctgcccaagaggaacagcgacaagctgatcgccagaaagaaggactgggaccctaagaagtacggcggcttcgacagccccaccgtggcctattctgtgctggtggtggccaaagtggaaaagggcaagtccaagaaactgaagagtgtgaaagagctgctggggatcaccatcatggaaagaagcagcttcgagaagaatcccatcgactttctggaagccaagggctacaaagaagtgaaaaaggacctgatcatcaagctgcctaagtactccctgttcgagctggaaaacggccggaagagaatgctggcctctgccggcgaactgcagaagggaaacgaactggccctgccctccaaatatgtgaacttcctgtacctggccagccactatgagaagctgaagggctcccccgaggataatgagcagaaacagctgtttgtggaacagcacaaacactacctggacgagatcatcgagcagatcagcgagttctccaagagagtgatcctggccgacgctaatctggacaaggtgctgagcgcctacaacaagcacagagacaagcctatcagagagcaggccgagaatatcatccacctgtttaccctgaccaatctgggagcccctgccgccttcaagtactttgacaccaccatcgaccggaagaggtacaccagcaccaaagaggtgctggacgccaccctgatccaccagagcatcaccggcctgtacgagacacggatcgacctgtctcagctgggaggcgacgcctatccctatgacgtgcccgattatgccagcctgggcagcggctcccccaagaaaaaacgcaaggtggaagatcctaagaaaaagcggaaagtggacggcagcggcagcgagacccccggtaccagcgagagcgccacccccgagagccggacactcgccaagaccgtggcctatttctacgaccccgacgtgggcaacttccactacggagctggacaccctatgaagccccatcgcctggcattgacccatagcctggtcctgcattacggtctctataagaagatgatcgtcttcaagccataccaggcctcccaacatgacatgtgccgcttccactccgaggactacattgacttcctgcagagagtcagccccaccaatatgcaaggcttcaccaagagtcttaatgccttcaacgtaggcgatgactgcccagtgtttcccgggctctttgagttctgctcgcgttacacaggcgcatctctgcaaggagcaacccagctgaacaacaagatctgtgatattgccattaactgggctggtggtctgcaccatgccaagaagtttgaggcctctggcttctgctatgtcaacgacattgtgattggcatcctggagctgctcaagtaccaccctcgggtgctctacattgacattgacatccaccatggtgacggggttcaagaagctttctacctcactgaccgggtcatgacggtgtccttccacaaatacggaaattacttcttccctggcacaggtgacatgtatgaagtcggggcagagagtggccgctactactgtctgaacgtgcccctgcgggatggcattgatgaccagagttacaagcaccttttccagccggttatcaaccaggtagtggacttctaccaacccacgtgcattgtgctccagtgtggagctgactctctgggctgtgatcgattgggctgctttaacctcagcatccgagggcatggggaatgcgttgaatatgtcaagagcttcaatatccctctactcgtgctgggtggtggtggttatactgtccgaaatgttgcccgctgctggacatatgagacatcgctgctggtagaagagggcagcggctaatga

SEQ ID NO: 251 - DNA, 7302 bp, synthetic construct
  misc_feature 1..7302: note = V66 CDS
  source 1..7302: mol_type = other DNA
atgcctgctgctaagagagtgaaactggatggatccaaccatgaccaggaatttgaccccccaaaggtttacccacctgtgccagctgagaagaggaagcccatccgcgtgctgtctctctttgatgggattgctacagggctcctggtgctgaaggacctgggcatccaagtggaccgctacattgcctccgaggtgtgtgaggactccatcacggtgggcatggtgcggcaccagggaaagatcatgtacgtcggggacgtccgcagcgtcacacagaagcatatccaggagtggggcccattcgacctggtgattggaggcagtccctgcaatgacctctccattgtcaaccctgcccgcaagggactttatgagggtactggccgcctcttctttgagttctaccgcctcctgcatgatgcgcggcccaaggagggagatgatcgccccttcttctggctctttgagaatgtggtggccatgggcgttagtgacaagagggacatctcgcgatttcttgagtctaaccccgtgatgattgacgccaaagaagtgtctgctgcacacagggcccgttacttctggggtaaccttcctggcatgaacaggcctttggcatccactgtgaatgataagctggagctgcaagagtgtctggagcacggcagaatagccaagttcagcaaagtgaggaccattaccaccaggtcaaactctataaagcagggcaaagaccagcatttccccgtcttcatgaacgagaaggaggacatcctgtggtgcactgaaatggaaagggtgtttggcttccccgtccactacacagacgtctccaacatgagccgcttggcgaggcagagactgctgggccgatcgtggagcgtgccggtcatccgccacctcttcgctccgctgaaggaatattttgcttgtgtgtctagcggcaatagtaacgctaacagccgcgggccgagcttcagcagcggcctggtgccgttaagcttgcgcggcagccatatgggccctatggagatatacaagacagtgtctgcatggaagagacagccagtgcgggtactgagcctcttcagaaacatcgacaaggtactaaagagtttgggcttcttggaaagcggttctggttctgggggaggaacgctgaagtacgtggaagatgtcacaaatgtcgtgaggagagacgtggagaaatggggcccctttgacctggtgtacggctcgacgcagcccctaggcagctcttgtgatcgctgtcccggctggtacatgttccagttccaccggatcctgcagtatgcgctgcctcgccaggagagtcagcggcccttcttctggatattcatggacaatctgctgctgactgaggatgaccaagagacaactacccgcttccttcagacagaggctgtgaccctccaggatgtccgtggcagagactaccagaatgctatgcgggtgtggagcaacattccagggctgaagagcaagcatgcgcccctgaccccaaaggaagaagagtatctgcaagcccaagtcagaagcaggagcaagctggacgccccgaaagttgacctcctggtgaagaactgccttctcccgctgagagagtacttcaagtatttttctcaaaactcacttcctcttggagggccgagctctggcgcacccccaccaagtggagggtctcctgccgggtccccaacatctactgaagaaggcaccagcgaatccgcaacgcccgagtcaggccctggtacctccacagaaccatctgaaggtagtgcgcctggttccccagctggaagccctacttccaccgaagaaggcacgtcaaccgaaccaagtgaaggatctgcccctgggaccagcactgaaccatctgagccaaaaaagaagagaaaggtaatggacaagaagtacagcatcggcctggccatcggcaccaactctgtgggctgggccgtgatcaccgacgagtacaaggtgcccagcaagaaattcaaggtgctgggcaacaccgaccggcacagcatcaagaagaacctgatcggcgccctgctgttcgacagcggagaaacagccgaggccacccggctgaagagaaccgccagaagaagatacaccagacggaagaaccggatctgctatctgcaagagatcttcagcaacgagatggccaaggtggacgacagcttcttccacagactggaagagtccttcctggtggaagaggataagaagcacgagcggcaccccatcttcggcaacatcgtggacgaggtggcctaccacgagaagtaccccaccatctaccacctgagaaagaaactggtggacagcaccgacaaggccgacctgcggctgatctatctggccctggcccacatgatcaagttccggggccacttcctgatcgagggcgacctgaaccccgacaacagcgacgtggacaagctgttcatccagctggtgcagacctacaaccagctgttcgaggaaaaccccatcaacgccagcggcgtggacgccaaggccatcctgtctgccagactgagcaagagcagacggctggaaaatctgatcgcccagctgcccggcgagaagaagaatggcctgttcggcaacctgattgccctgagcctgggcctgacccccaacttcaagagcaacttcgacctggccgaggatgccaaactgcagctgagcaaggacacctacgacgacgacctggacaacctgctggcccagatcggcgaccagtacgccgacctgtttctggccgccaagaacctgtccgacgccatcctgctgagcgacatcctgagagtgaacaccgagatcaccaaggcccccctgagcgcctctatgatcaagagatacgacgagcaccaccaggacctgaccctgctgaaagctctcgtgcggcagcagctgcctgagaagtacaaagagattttcttcgaccagagcaagaacggctacgccggctacatcgatggcggagccagccaggaagagttctacaagttcatcaagcccatcctggaaaagatggacggcaccgaggaactgctcgtgaagctgaacagagaggacctgctgcggaagcagcggaccttcgacaacggcagcatcccccaccagatccacctgggagagctgcacgccattctgcggcggcaggaagatttttacccattcctgaaggacaaccgggaaaagatcgagaagatcctgaccttccgcatcccctactacgtgggccctctggccaggggaaacagcagattcgcctggatgaccagaaagagcgaggaaaccatcaccccctggaacttcgaggaagtggtggacaagggcgccagcgcccagagcttcatcgagcggatgaccaacttcgataagaacctgcccaacgagaaggtgctgcccaagcacagcctgctgtacgagtacttcaccgtgtacaacgagctgaccaaagtgaaatacgtgaccgagggaatgagaaagcccgccttcctgagcggcgagcagaaaaaagccatcgtggacctgctgttcaagaccaaccggaaagtgaccgtgaagcagctgaaagaggactacttcaagaaaatcgagtgcttcgactccgtggaaatctccggcgtggaagatcggttcaacgcctccctgggcacataccacgatctgctgaaaattatcaaggacaaggacttcctggacaatgaggaaaacgaggacattctggaagatatcgtgctgaccctgacactgtttgaggacagagagatgatcgaggaacggctgaaaacctatgcccacctgttcgacgacaaagtgatgaagcagctgaagcggcggagatacaccggctggggcaggctgagccggaagctgatcaacggcatccgggacaagcagtccggcaagacaatcctggatttcctgaagtccgacggcttcgccaacagaaacttcatgcagctgatccacgacgacagcctgacctttaaagaggacatccagaaagcccaggtgtccggccagggcgatagcctgcacgagcacattgccaatctggccggcagccccgccattaagaagggcatcctgcagacagtgaaggtggtggacgagctcgtgaaagtgatgggccggcacaagcccgagaacatcgtgatcgaaatggccagagagaaccagaccacccagaagggacagaagaacagccgcgagagaatgaagcggatcgaagagggcatcaaagagctgggcagccagatcctgaaagaacaccccgtggaaaacacccagctgcagaacgagaagctgtacctgtactacctgcagaatgggcgggatatgtacgtggaccaggaactggacatcaaccggctgtccgactacgatgtggacgctatcgtgcctcagagctttctgaaggacgactccatcgataacaaagtgctgactcggagcgacaagaaccggggcaagagcgacaacgtgccctccgaagaggtcgtgaagaagatgaagaactactggcgccagctgctgaatgccaagctgattacccagaggaagttcgacaatctgaccaaggccgagagaggcggcctgagcgaactggataaggccggcttcatcaagagacagctggtggaaacccggcagatcacaaagcacgtggcacagatcctggactcccggatgaacactaagtacgacgagaacgacaaactgatccgggaagtgaaagtgatcaccctgaagtccaagctggtgtccgatttccggaaggatttccagttttacaaagtgcgcgagatcaacaactaccaccacgcccacgacgcctacctgaacgccgtcgtgggaaccgccctgatcaaaaagtaccctaagctggaaagcgagttcgtgtacggcgactacaaggtgtacgacgtgcggaagatgatcgccaagagcgagcaggaaatcggcaaggctaccgccaagtacttcttctacagcaacatcatgaactttttcaagaccgagattaccctggccaacggcgagatccggaagcggcctctgatcgagacaaacggcgaaacaggcgagatcgtgtgggataagggccgggactttgccaccgtgcggaaagtgctgtctatgccccaagtgaatatcgtgaaaaagaccgaggtgcagacaggcggcttcagcaaagagtctatcctgcccaagaggaacagcgacaagctgatcgccagaaagaaggactgggaccctaagaagtacggcggcttcgacagccccaccgtggcctattctgtgctggtggtggccaaagtggaaaagggcaagtccaagaaactgaagagtgtgaaagagctgctggggatcaccatcatggaaagaagcagcttcgagaagaatcccatcgactttctggaagccaagggctacaaagaagtgaaaaaggacctgatcatcaagctgcctaagtactccctgttcgagctggaaaacggccggaagagaatgctggcctctgccggcgaactgcagaagggaaacgaactggccctgccctccaaatatgtgaacttcctgtacctggccagccactatgagaagctgaagggctcccccgaggataatgagcagaaacagctgtttgtggaacagcacaaacactacctggacgagatcatcgagcagatcagcgagttctccaagagagtgatcctggccgacgctaatctggacaaggtgctgagcgcctacaacaagcacagagacaagcctatcagagagcaggccgagaatatcatccacctgtttaccctgaccaatctgggagcccctgccgccttcaagtactttgacaccaccatcgaccggaagaggtacaccagcaccaaagaggtgctggacgccaccctgatccaccagagcatcaccggcctgtacgagacacggatcgacctgtctcagctgggaggcgacgcctatccctatgacgtgcccgattatgccagcctgggcagcggctcccccaagaaaaaacgcaaggtggaagatcctaagaaaaagcggaaagtggacggcagcggcagcgagacccccggtaccagcgagagcgccacccccgagagccggacactcgccaagaccgtggcctatttctacgaccccgacgtgggcaacttccactacggagctggacaccctatgaagccccatcgcctggcattgacccatagcctggtcctgcattacggtctctataagaagatgatcgtcttcaagccataccaggcctcccaacatgacatgtgccgcttccactccgaggactacattgacttcctgcagagagtcagccccaccaatatgcaaggcttcaccaagagtcttaatgccttcaacgtaggcgatgactgcccagtgtttcccgggctctttgagttctgctcgcgttacacaggcgcatctctgcaaggagcaacccagctgaacaacaagatctgtgatattgccattaactgggctggtggtctgcaccatgccaagaagtttgaggcctctggcttctgctatgtcaacgacattgtgattggcatcctggagctgctcaagtaccaccctcgggtgctctacattgacattgacatccaccatggtgacggggttcaagaagctttctacctcactgaccgggtcatgacggtgtccttccacaaatacggaaattacttcttccctggcacaggtgacatgtatgaagtcggggcagagagtggccgctactactgtctgaacgtgcccctgcgggatggcattgatgaccagagttacaagcaccttttccagccggttatcaaccaggtagtggacttctaccaacccacgtgcattgtgctccagtgtggagctgactctctgggctgtgatcgattgggctgctttaacctcagcatccgagggcatggggaatgcgttgaatatgtcaagagcttcaatatccctctactcgtgctgggtggtggtggttatactgtccgaaatgttgcccgctgctggacatatgagacatcgctgctggtagaagaggccattagtgaggagcttccctatagtgaatacttcgagtactttgccccagacttcacacttcatccagatgtcagcacccgcatcgagaatcagaactcacgccagtatctggaccagatccgccagacaatctttgaaaacctggagggcagcggctaatga

SEQ ID NO: 252 - DNA, 7098 bp, synthetic construct
  misc_feature 1..7098: note = V67 CDS
  source 1..7098: mol_type = other DNA
atgcctgctgctaagagagtgaaactggatggatccaaccatgaccaggaatttgaccccccaaaggtttacccacctgtgccagctgagaagaggaagcccatccgcgtgctgtctctctttgatgggattgctacagggctcctggtgctgaaggacctgggcatccaagtggaccgctacattgcctccgaggtgtgtgaggactccatcacggtgggcatggtgcggcaccagggaaagatcatgtacgtcggggacgtccgcagcgtcacacagaagcatatccaggagtggggcccattcgacctggtgattggaggcagtccctgcaatgacctctccattgtcaaccctgcccgcaagggactttatgagggtactggccgcctcttctttgagttctaccgcctcctgcatgatgcgcggcccaaggagggagatgatcgccccttcttctggctctttgagaatgtggtggccatgggcgttagtgacaagagggacatctcgcgatttcttgagtctaaccccgtgatgattgacgccaaagaagtgtctgctgcacacagggcccgttacttctggggtaaccttcctggcatgaacaggcctttggcatccactgtgaatgataagctggagctgcaagagtgtctggagcacggcagaatagccaagttcagcaaagtgaggaccattaccaccaggtcaaactctataaagcagggcaaagaccagcatttccccgtcttcatgaacgagaaggaggacatcctgtggtgcactgaaatggaaagggtgtttggcttccccgtccactacacagacgtctccaacatgagccgcttggcgaggcagagactgctgggccgatcgtggagcgtgccggtcatccgccacctcttcgctccgctgaaggaatattttgcttgtgtgtctagcggcaatagtaacgctaacagccgcgggccgagcttcagcagcggcctggtgccgttaagcttgcgcggcagccatatgggccctatggagatatacaagacagtgtctgcatggaagagacagccagtgcgggtactgagcctcttcagaaacatcgacaaggtactaaagagtttgggcttcttggaaagcggttctggttctgggggaggaacgctgaagtacgtggaagatgtcacaaatgtcgtgaggagagacgtggagaaatggggcccctttgacctggtgtacggctcgacgcagcccctaggcagctcttgtgatcgctgtcccggctggtacatgttccagttccaccggatcctgcagtatgcgctgcctcgccaggagagtcagcggcccttcttctggatattcatggacaatctgctgctgactgaggatgaccaagagacaactacccgcttccttcagacagaggctgtgaccctccaggatgtccgtggcagagactaccagaatgctatgcgggtgtggagcaacattccagggctgaagagcaagcatgcgcccctgaccccaaaggaagaagagtatctgcaagcccaagtcagaagcaggagcaagctggacgccccgaaagttgacctcctggtgaagaactgccttctcccgctgagagagtacttcaagtatttttctcaaaactcacttcctcttggagggccgagctctggcgcacccccaccaagtggagggtctcctgccgggtccccaacatctactgaagaaggcaccagcgaatccgcaacgcccgagtcaggccctggtacctccacagaaccatctgaaggtagtgcgcctggttccccagctggaagccctacttccaccgaagaaggcacgtcaaccgaaccaagtgaaggatctgcccctgggaccagcactgaaccatctgagccaaaaaagaagagaaaggtaatggacaagaagtacagcatcggcctggccatcggcaccaactctgtgggctgggccgtgatcaccgacgagtacaaggtgcccagcaagaaattcaaggtgctgggcaacaccgaccggcacagcatcaagaagaacctgatcggcgccctgctgttcgacagcggagaaacagccgaggccacccggctgaagagaaccgccagaagaagatacaccagacggaagaaccggatctgctatctgcaagagatcttcagcaacgagatggccaaggtggacgacagcttcttccacagactggaagagtccttcctggtggaagaggataagaagcacgagcggcaccccatcttcggcaacatcgtggacgaggtggcctaccacgagaagtaccccaccatctaccacctgagaaagaaactggtggacagcaccgacaaggccgacctgcggctgatctatctggccctggcccacatgatcaagttccggggccacttcctgatcgagggcgacctgaaccccgacaacagcgacgtggacaagctgttcatccagctggtgcagacctacaaccagctgttcgaggaaaaccccatcaacgccagcggcgtggacgccaaggccatcctgtctgccagactgagcaagagcagacggctggaaaatctgatcgcccagctgcccggcgagaagaagaatggcctgttcggcaacctgattgccctgagcctgggcctgacccccaacttcaagagcaacttcgacctggccgaggatgccaaactgcagctgagcaaggacacctacgacgacgacctggacaacctgctggcccagatcggcgaccagtacgccgacctgtttctggccgccaagaacctgtccgacgccatcctgctgagcgacatcctgagagtgaacaccgagatcaccaaggcccccctgagcgcctctatgatcaagagatacgacgagcaccaccaggacctgaccctgctgaaagctctcgtgcggcagcagctgcctgagaagtacaaagagattttcttcgaccagagcaagaacggctacgccggctacatcgatggcggagccagccaggaagagttctacaagttcatcaagcccatcctggaaaagatggacggcaccgaggaactgctcgtgaagctgaacagagaggacctgctgcggaagcagcggaccttcgacaacggcagcatcccccaccagatccacctgggagagctgcacgccattctgcggcggcaggaagatttttacccattcctgaaggacaaccgggaaaagatcgagaagatcctgaccttccgcatcccctactacgtgggccctctggccaggggaaacagcagattcgcctggatgaccagaaagagcgaggaaaccatcaccccctggaacttcgaggaagtggtggacaagggcgccagcgcccagagcttcatcgagcggatgaccaacttcgataagaacctgcccaacgagaaggtgctgcccaagcacagcctgctgtacgagtacttcaccgtgtacaacgagctgaccaaagtgaaatacgtgaccgagggaatgagaaagcccgccttcctgagcggcgagcagaaaaaagccatcgtggacctgctgttcaagaccaaccggaaagtgaccgtgaagcagctgaaagaggactacttcaagaaaatcgagtgcttcgactccgtggaaatctccggcgtggaagatcggttcaacgcctccctgggcacataccacgatctgctgaaaattatcaaggacaaggacttcctggacaatgaggaaaacgaggacattctggaagatatcgtgctgaccctgacactgtttgaggacagagagatgatcgaggaacggctgaaaacctatgcccacctgttcgacgacaaagtgatgaagcagctgaagcggcggagatacaccggctggggcaggctgagccggaagctgatcaacggcatccgggacaagcagtccggcaagacaatcctggatttcctgaagtccgacggcttcgccaacagaaacttcatgcagctgatccacgacgacagcctgacctttaaagaggacatccagaaagcccaggtgtccggccagggcgatagcctgcacgagcacattgccaatctggccggcagccccgccattaagaagggcatcctgcagacagtgaaggtggtggacgagctcgtgaaagtgatgggccggcacaagcccgagaacatcgtgatcgaaatggccagagagaaccagaccacccagaagggacagaagaacagccgcgagagaatgaagcggatcgaagagggcatcaaagagctgggcagccagatcctgaaagaacaccccgtggaaaacacccagctgcagaacgagaagctgtacctgtactacctgcagaatgggcgggatatgtacgtggaccaggaactggacatcaaccggctgtccgactacgatgtggacgctatcgtgcctcagagctttctgaaggacgactccatcgataacaaagtgctgactcggagcgacaagaaccggggcaagagcgacaacgtgccctccgaagaggtcgtgaagaagatgaagaactactggcgccagctgctgaatgccaagctgattacccagaggaagttcgacaatctgaccaaggccgagagaggcggcctgagcgaactggataaggccggcttcatcaagagacagctggtggaaacccggcagatcacaaagcacgtggcacagatcctggactcccggatgaacactaagtacgacgagaacgacaaactgatccgggaagtgaaagtgatcaccctgaagtccaagctggtgtccgatttccggaaggatttccagttttacaaagtgcgcgagatcaacaactaccaccacgcccacgacgcctacctgaacgccgtcgtgggaaccgccctgatcaaaaagtaccctaagctggaaagcgagttcgtgtacggcgactacaaggtgtacgacgtgcggaagatgatcgccaagagcgagcaggaaatcggcaaggctaccgccaagtacttcttctacagcaacatcatgaactttttcaagaccgagattaccctggccaacggcgagatccggaagcggcctctgatcgagacaaacggcgaaacaggcgagatcgtgtgggataagggccgggactttgccaccgtgcggaaagtgctgtctatgccccaagtgaatatcgtgaaaaagaccgaggtgcagacaggcggcttcagcaaagagtctatcctgcccaagaggaacagcgacaagctgatcgccagaaagaaggactgggaccctaagaagtacggcggcttcgacagccccaccgtggcctattctgtgctggtggtggccaaagtggaaaagggcaagtccaagaaactgaagagtgtgaaagagctgctggggatcaccatcatggaaagaagcagcttcgagaagaatcccatcgactttctggaagccaagggctacaaagaagtgaaaaaggacctgatcatcaagctgcctaagtactccctgttcgagctggaaaacggccggaagagaatgctggcctctgccggcgaactgcagaagggaaacgaactggccctgccctccaaatatgtgaacttcctgtacctggccagccactatgagaagctgaagggctcccccgaggataatgagcagaaacagctgtttgtggaacagcacaaacactacctggacgagatcatcgagcagatcagcgagttctccaagagagtgatcctggccgacgctaatctggacaaggtgctgagcgcctacaacaagcacagagacaagcctatcagagagcaggccgagaatatcatccacctgtttaccctgaccaatctgggagcccctgccgccttcaagtactttgacaccaccatcgaccggaagaggtacaccagcaccaaagaggtgctggacgccaccctgatccaccagagcatcaccggcctgtacgagacacggatcgacctgtctcagctgggaggcgacgcctatccctatgacgtgcccgattatgccagcctgggcagcggctcccccaagaaaaaacgcaaggtggaagatcctaagaaaaagcggaaagtggacggcagcggcagcgagacccccggtaccagcgagagcgccacccccgagagccggacaaatcgggccatccgcacagagaagatcatctgccgggacgtggctcggggctatgagaacgtgcccattccctgtgtcaacggtgtggatggggagccctgccctgaggattacaagtacatctcagagaactgcgagacgtccaccatgaacatcgatcgcaacatcacccacctgcagcactgcacgtgtgtggacgactgctctagctccaactgcctgtgcggccagctcagcatccggtgctggtatgacaaggatgggcgattgctccaggaatttaacaagattgagcctccgctgattttcgagtgtaaccaggcgtgctcatgctggagaaactgcaagaaccgggtcgtacagagtggcatcaaggtgcggctacagctctaccgaacagccaagatgggctggggggtccgcgccctgcagaccatcccacaggggaccttcatctgcgagtatgtcggggagctgatctctgatgctgaggctgatgtgagagaggatgattcttacctcttcgacttagacaacaaggatggagaggtgtactgcatagatgcccgttactatggcaacatcagccgcttcatcaaccacctgtgtgaccccaacatcattcccgtccgggtcttcatgctgcaccaagacctgcgatttccacgcatcgccttcttcagttcccgagacatccggactggggaggagctagggtttgactatggcgaccgcttctgggacatcaaaagcaaatatttcacctgccaatgtggctctgagaagtgcaagcactcagccgaagccattgccctggagcagagccgtctggcccgcctggacccacaccctgagctgctgcccgagctcggctccctgccccctgtcaacacagagggcagcggctaatga

SEQ ID NO: 253 - DNA, 7659 bp, synthetic construct
  misc_feature 1..7659: note = V68 CDS
  source 1..7659: mol_type = other DNA
atgcctgctgctaagagagtgaaactggatggatccaccggtccagccaccatgaaccatgaccaggaatttgaccccccaaaggtttacccacctgtgccagctgagaagaggaagcccatccgcgtgctgtctctctttgatgggattgctacagggctcctggtgctgaaggacctgggcatccaagtggaccgctacattgcctccgaggtgtgtgaggactccatcacggtgggcatggtgcggcaccagggaaagatcatgtacgtcggggacgtccgcagcgtcacacagaagcatatccaggagtggggcccattcgacctggtgattggaggcagtccctgcaatgacctctccattgtcaaccctgcccgcaagggactttatgagggtactggccgcctcttctttgagttctaccgcctcctgcatgatgcgcggcccaaggagggagatgatcgccccttcttctggctctttgagaatgtggtggccatgggcgttagtgacaagagggacatctcgcgatttcttgagtctaaccccgtgatgattgacgccaaagaagtgtctgctgcacacagggcccgttacttctggggtaaccttcctggcatgaacaggcctttggcatccactgtgaatgataagctggagctgcaagagtgtctggagcacggcagaatagccaagttcagcaaagtgaggaccattaccaccaggtcaaactctataaagcagggcaaagaccagcatttccccgtcttcatgaacgagaaggaggacatcctgtggtgcactgaaatggaaagggtgtttggcttccccgtccactacacagacgtctccaacatgagccgcttggcgaggcagagactgctgggccgatcgtggagcgtgccggtcatccgccacctcttcgctccgctgaaggaatattttgcttgtgtgtctagcggcaatagtaacgctaacagccgcgggccgagcttcagcagcggcctggtgccgttaagcttgcgcggcagccatatgggccctatggagatatacaagacagtgtctgcatggaagagacagccagtgcgggtactgagcctcttcagaaacatcgacaaggtactaaagagtttgggcttcttggaaagcggttctggttctgggggaggaacgctgaagtacgtggaagatgtcacaaatgtcgtgaggagagacgtggagaaatggggcccctttgacctggtgtacggctcgacgcagcccctaggcagctcttgtgatcgctgtcccggctggtacatgttccagttccaccggatcctgcagtatgcgctgcctcgccaggagagtcagcggcccttcttctggatattcatggacaatctgctgctgactgaggatgaccaagagacaactacccgcttccttcagacagaggctgtgaccctccaggatgtccgtggcagagactaccagaatgctatgcgggtgtggagcaacattccagggctgaagagcaagcatgcgcccctgaccccaaaggaagaagagtatctgcaagcccaagtcagaagcaggagcaagctggacgccccgaaagttgacctcctggtgaagaactgccttctcccgctgagagagtacttcaagtatttttctcaaaactcacttcctcttggagggccgagctctggcgcacccccaccaagtggagggtctcctgccgggtccccaacatctactgaagaaggcaccagcgaatccgcaacgcccgagtcaggccctggtacctccacagaaccatctgaaggtagtgcgcctggttccccagctggaagccctacttccaccgaagaaggcacgtcaaccgaaccaagtgaaggatctgcccctgggaccagcactgaaccatctgagccaaaaaagaagagaaaggtaatggacaagaagtacagcatcggcctggccatcggcaccaactctgtgggctgggccgtgatcaccgacgagtacaaggtgcccagcaagaaattcaaggtgctgggcaacaccgaccggcacagcatcaagaagaacctgatcggcgccctgctgttcgacagcggagaaacagccgaggccacccggctgaagagaaccgccagaagaagatacaccagacggaagaaccggatctgctatctgcaagagatcttcagcaacgagatggccaaggtggacgacagcttcttccacagactggaagagtccttcctggtggaagaggataagaagcacgagcggcaccccatcttcggcaacatcgtggacgaggtggcctaccacgagaagtaccccaccatctaccacctgagaaagaaactggtggacagcaccgacaaggccgacctgcggctgatctatctggccctggcccacatgatcaagttccggggccacttcctgatcgagggcgacctgaaccccgacaacagcgacgtggacaagctgttcatccagctggtgcagacctacaaccagctgttcgaggaaaaccccatcaacgccagcggcgtggacgccaaggccatcctgtctgccagactgagcaagagcagacggctggaaaatctgatcgcccagctgcccggcgagaagaagaatggcctgttcggcaacctgattgccctgagcctgggcctgacccccaacttcaagagcaacttcgacctggccgaggatgccaaactgcagctgagcaaggacacctacgacgacgacctggacaacctgctggcccagatcggcgaccagtacgccgacctgtttctggccgccaagaacctgtccgacgccatcctgctgagcgacatcctgagagtgaacaccgagatcaccaaggcccccctgagcgcctctatgatcaagagatacgacgagcaccaccaggacctgaccctgctgaaagctctcgtgcggcagcagctgcctgagaagtacaaagagattttcttcgaccagagcaagaacggctacgccggctacatcgatggcggagccagccaggaagagttctacaagttcatcaagcccatcctggaaaagatggacggcaccgaggaactgctcgtgaagctgaacagagaggacctgctgcggaagcagcggaccttcgacaacggcagcatcccccaccagatccacctgggagagctgcacgccattctgcggcggcaggaagatttttacccattcctgaaggacaaccgggaaaagatcgagaagatcctgaccttccgcatcccctactacgtgggccctctggccaggggaaacagcagattcgcctggatgaccagaaagagcgaggaaaccatcaccccctggaacttcgaggaagtggtggacaagggcgccagcgcccagagcttcatcgagcggatgaccaacttcgataagaacctgcccaacgagaaggtgctgcccaagcacagcctgctgtacgagtacttcaccgtgtacaacgagctgaccaaagtgaaatacgtgaccgagggaatgagaaagcccgccttcctgagcggcgagcagaaaaaagccatcgtggacctgctgttcaagaccaaccggaaagtgaccgtgaagcagctgaaagaggactacttcaagaaaatcgagtgcttcgactccgtggaaatctccggcgtggaagatcggttcaacgcctccctgggcacataccacgatctgctgaaaattatcaaggacaaggacttcctggacaatgaggaaaacgaggacattctggaagatatcgtgctgaccctgacactgtttgaggacagagagatgatcgaggaacggctgaaaacctatgcccacctgttcgacgacaaagtgatgaagcagctgaagcggcggagatacaccggctggggcaggctgagccggaagctgatcaacggcatccgggacaagcagtccggcaagacaatcctggatttcctgaagtccgacggcttcgccaacagaaacttcatgcagctgatccacgacgacagcctgacctttaaagaggacatccagaaagcccaggtgtccggccagggcgatagcctgcacgagcacattgccaatctggccggcagccccgccattaagaagggcatcctgcagacagtgaaggtggtggacgagctcgtgaaagtgatgggccggcacaagcccgagaacatcgtgatcgaaatggccagagagaaccagaccacccagaagggacagaagaacagccgcgagagaatgaagcggatcgaagagggcatcaaagagctgggcagccagatcctgaaagaacaccccgtggaaaacacccagctgcagaacgagaagctgtacctgtactacctgcagaatgggcgggatatgtacgtggaccaggaactggacatcaaccggctgtccgactacgatgtggacgctatcgtgcctcagagctttctgaaggacgactccatcgataacaaagtgctgactcggagcgacaagaaccggggcaagagcgacaacgtgccctccgaagaggtcgtgaagaagatgaagaactactggcgccagctgctgaatgccaagctgattacccagaggaagttcgacaatctgaccaaggccgagagaggcggcctgagcgaactggataaggccggcttcatcaagagacagctggtggaaacccggcagatcacaaagcacgtggcacagatcctggactcccggatgaacactaagtacgacgagaacgacaaactgatccgggaagtgaaagtgatcaccctgaagtccaagctggtgtccgatttccggaaggatttccagttttacaaagtgcgcgagatcaacaactaccaccacgcccacgacgcctacctgaacgccgtcgtgggaaccgccctgatcaaaaagtaccctaagctggaaagcgagttcgtgtacggcgactacaaggtgtacgacgtgcggaagatgatcgccaagagcgagcaggaaatcggcaaggctaccgccaagtacttcttctacagcaacatcatgaactttttcaagaccgagattaccctggccaacggcgagatccggaagcggcctctgatcgagacaaacggcgaaacaggcgagatcgtgtgggataagggccgggactttgccaccgtgcggaaagtgctgtctatgccccaagtgaatatcgtgaaaaagaccgaggtgcagacaggcggcttcagcaaagagtctatcctgcccaagaggaacagcgacaagctgatcgccagaaagaaggactgggaccctaagaagtacggcggcttcgacagccccaccgtggcctattctgtgctggtggtggccaaagtggaaaagggcaagtccaagaaactgaagagtgtgaaagagctgctggggatcaccatcatggaaagaagcagcttcgagaagaatcccatcgactttctggaagccaagggctacaaagaagtgaaaaaggacctgatcatcaagctgcctaagtactccctgttcgagctggaaaacggccggaagagaatgctggcctctgccggcgaactgcagaagggaaacgaactggccctgccctccaaatatgtgaacttcctgtacctggccagccactatgagaagctgaagggctcccccgaggataatgagcagaaacagctgtttgtggaacagcacaaacactacctggacgagatcatcgagcagatcagcgagttctccaagagagtgatcctggccgacgctaatctggacaaggtgctgagcgcctacaacaagcacagagacaagcctatcagagagcaggccgagaatatcatccacctgtttaccctgaccaatctgggagcccctgccgccttcaagtactttgacaccaccatcgaccggaagaggtacaccagcaccaaagaggtgctggacgccaccctgatccaccagagcatcaccggcctgtacgagacacggatcgacctgtctcagctgggaggcgacgcctatccctatgacgtgcccgattatgccagcctgggcagcggctcccccaagaaaaaacgcaaggtggaagatcctaagaaaaagcggaaagtggacggcagcggcagcgagacccccggtaccagcgagagcgccacccccgagagccggacactcgagatggcgcagacgcagggcacccggaggaaagtctgttactactacgacggggatgttggaaattactattatggacaaggccacccaatgaagcctcaccgaatccgcatgactcataatttgctgctcaactatggtctctaccgaaaaatggaaatctatcgccctcacaaagccaatgctgaggagatgaccaagtaccacagcgatgactacattaaattcttgcgctccatccgtccagataacatgtcggagtacagcaagcagatgcagagattcaacgttggtgaggactgtccagtattcgatggcctgtttgagttctgtcagttgtctactggtggttctgtggcaagtgctgtgaaacttaataagcagcagacggacatcgctgtgaattgggctgggggcctgcaccatgcaaagaagtccgaggcatctggcttctgttacgtcaatgatatcgtcttggccatcctggaactgctaaagtatcaccagagggtgctgtacattgacattgatattcaccatggtgacggcgtggaagaggccttctacaccacggaccgggtcatgactgtgtcctttcataagtatggagagtacttcccaggaactggggacctacgggatatcggggctggcaaaggcaagtattatgctgttaactacccgctccgagacgggattgatgacgagtcctatgaggccattttcaagccggtcatgtccaaagtaatggagatgttccagcctagtgcggtggtcttacagtgtggctcagactccctatctggggatcggttaggttgcttcaatctaactatcaaaggacacgccaagtgtgtggaatttgtcaagagctttaacctgcctatgctgatgctgggaggcggtggttacaccattcgtaacgttgcccggtgctggacatatgagacagctgtggccctggatacggagatccctaatgagcttccatacaatgactactttgaatactttggaccagatttcaagctccacatcagtccttccaatatgactaaccagaacacgaatgagtacctggagaagatcaaacagcgactgtttgagaaccttagaatgctgccgcacgcacctggggtccaaatgcaggcgattcctgaggacgccatccctgaggagagtggcgatgaggacgaagacgaccctgacaagcgcatctcgatctgctcctctgacaaacgaattgcctgtgaggaagagttctccgattctgaagaggagggagaggggggccgcaagaactcttccaacttcaaaaaagccaagagagtcaaaacagaggatgaaaaagagaaagacccagaggagaagaaagaagtcaccgaagaggagaaaaccaaggaggagaagccagaagccaaaggggtcaaggaggaggtcaagttggcctga

SEQ ID NO: 254 - DNA, 7326 bp, synthetic construct
  misc_feature 1..7326: note = V69 CDS
  source 1..7326: mol_type = other DNA
atgcctgctgctaagagagtgaaactggatggatccaccggtccagccaccatgaaccatgaccaggaatttgaccccccaaaggtttacccacctgtgccagctgagaagaggaagcccatccgcgtgctgtctctctttgatgggattgctacagggctcctggtgctgaaggacctgggcatccaagtggaccgctacattgcctccgaggtgtgtgaggactccatcacggtgggcatggtgcggcaccagggaaagatcatgtacgtcggggacgtccgcagcgtcacacagaagcatatccaggagtggggcccattcgacctggtgattggaggcagtccctgcaatgacctctccattgtcaaccctgcccgcaagggactttatgagggtactggccgcctcttctttgagttctaccgcctcctgcatgatgcgcggcccaaggagggagatgatcgccccttcttctggctctttgagaatgtggtggccatgggcgttagtgacaagagggacatctcgcgatttcttgagtctaaccccgtgatgattgacgccaaagaagtgtctgctgcacacagggcccgttacttctggggtaaccttcctggcatgaacaggcctttggcatccactgtgaatgataagctggagctgcaagagtgtctggagcacggcagaatagccaagttcagcaaagtgaggaccattaccaccaggtcaaactctataaagcagggcaaagaccagcatttccccgtcttcatgaacgagaaggaggacatcctgtggtgcactgaaatggaaagggtgtttggcttccccgtccactacacagacgtctccaacatgagccgcttggcgaggcagagactgctgggccgatcgtggagcgtgccggtcatccgccacctcttcgctccgctgaaggaatattttgcttgtgtgtctagcggcaatagtaacgctaacagccgcgggccgagcttcagcagcggcctggtgccgttaagcttgcgcggcagccatatgggccctatggagatatacaagacagtgtctgcatggaagagacagccagtgcgggtactgagcctcttcagaaacatcgacaaggtactaaagagtttgggcttcttggaaagcggttctggttctgggggaggaacgctgaagtacgtggaagatgtcacaaatgtcgtgaggagagacgtggagaaatggggcccctttgacctggtgtacggctcgacgcagcccctaggcagctcttgtgatcgctgtcccggctggtacatgttccagttccaccggatcctgcagtatgcgctgcctcgccaggagagtcagcggcccttcttctggatattcatggacaatctgctgctgactgaggatgaccaagagacaactacccgcttccttcagacagaggctgtgaccctccaggatgtccgtggcagagactaccagaatgctatgcgggtgtggagcaacattccagggctgaagagcaagcatgcgcccctgaccccaaaggaagaagagtatctgcaagcccaagtcagaagcaggagcaagctggacgccccgaaagttgacctcctggtgaagaactgccttctcccgctgagagagtacttcaagtatttttctcaaaactcacttcctcttggagggccgagctctggcgcacccccaccaagtggagggtctcctgccgggtccccaacatctactgaagaaggcaccagcgaatccgcaacgcccgagtcaggccctggtacctccacagaaccatctgaaggtagtgcgcctggttccccagctggaagccctacttccaccgaagaaggcacgtcaaccgaaccaagtgaaggatctgcccctgggaccagcactgaaccatctgagccaaaaaagaagagaaaggtaatggacaagaagtacagcatcggcctggccatcggcaccaactctgtgggctgggccgtgatcaccgacgagtacaaggtgcccagcaagaaattcaaggtgctgggcaacaccgaccggcacagcatcaagaagaacctgatcggcgccctgctgttcgacagcggagaaacagccgaggccacccggctgaagagaaccgccagaagaagatacaccagacggaagaaccggatctgctatctgcaagagatcttcagcaacgagatggccaaggtggacgacagcttcttccacagactggaagagtccttcctggtggaagaggataagaagcacgagcggcaccccatcttcggcaacatcgtggacgaggtggcctaccacgagaagtaccccaccatctaccacctgagaaagaaactggtggacagcaccgacaaggccgacctgcggctgatctatctggccctggcccacatgatcaagttccggggccacttcctgatcgagggcgacctgaaccccgacaacagcgacgtggacaagctgttcatccagctggtgcagacctacaaccagctgttcgaggaaaaccccatcaacgccagcggcgtggacgccaaggccatcctgtctgccagactgagcaagagcagacggctggaaaatctgatcgcccagctgcccggcgagaagaagaatggcctgttcggcaacctgattgccctgagcctgggcctgacccccaacttcaagagcaacttcgacctggccgaggatgccaaactgcagctgagcaaggacacctacgacgacgacctggacaacctgctggcccagatcggcgaccagtacgccgacctgtttctggccgccaagaacctgtccgacgccatcctgctgagcgacatcctgagagtgaacaccgagatcaccaaggcccccctgagcgcctctatgatcaagagatacgacgagcaccaccaggacctgaccctgctgaaagctctcgtgcggcagcagctgcctgagaagtacaaagagattttcttcgaccagagcaagaacggctacgccggctacatcgatggcggagccagccaggaagagttctacaagttcatcaagcccatcctggaaaagatggacggcaccgaggaactgctcgtgaagctgaacagagaggacctgctgcggaagcagcggaccttcgacaacggcagcatcccccaccagatccacctgggagagctgcacgccattctgcggcggcaggaagatttttacccattcctgaaggacaaccgggaaaagatcgagaagatcctgaccttccgcatcccctactacgtgggccctctggccaggggaaacagcagattcgcctggatgaccagaaagagcgaggaaaccatcaccccctggaacttcgaggaagtggtggacaagggcgccagcgcccagagcttcatcgagcggatgaccaacttcgataagaacctgcccaacgagaaggtgctgcccaagcacagcctgctgtacgagtacttcaccgtgtacaacgagctgaccaaagtgaaatacgtgaccgagggaatgagaaagcccgccttcctgagcggcgagcagaaaaaagccatcgtggacctgctgttcaagaccaaccggaaagtgaccgtgaagcagctgaaagaggactacttcaagaaaatcgagtgcttcgactccgtggaaatctccggcgtggaagatcggttcaacgcctccctgggcacataccacgatctgctgaaaattatcaaggacaaggacttcctggacaatgaggaaaacgaggacattctggaagatatcgtgctgaccctgacactgtttgaggacagagagatgatcgaggaacggctgaaaacctatgcccacctgttcgacgacaaagtgatgaagcagctgaagcggcggagatacaccggctggggcaggctgagccggaagctgatcaacggcatccgggacaagcagtccggcaagacaatcctggatttcctgaagtccgacggcttcgccaacagaaacttcatgcagctgatccacgacgacagcctgacctttaaagaggacatccagaaagcccaggtgtccggccagggcgatagcctgcacgagcacattgccaatctggccggcagccccgccattaagaagggcatcctgcagacagtgaaggtggtggacgagctcgtgaaagtgatgggccggcacaagcccgagaacatcgtgatcgaaatggccagagagaaccagaccacccagaagggacagaagaacagccgcgagagaatgaagcggatcgaagagggcatcaaagagctgggcagccagatcctgaaagaacaccccgtggaaaacacccagctgcagaacgagaagctgtacctgtactacctgcagaatgggcgggatatgtacgtggaccaggaactggacatcaaccggctgtccgactacgatgtggacgctatcgtgcctcagagctttctgaaggacgactccatcgataacaaagtgctgactcggagcgacaagaaccggggcaagagcgacaacgtgccctccgaagaggtcgtgaagaagatgaagaactactggcgccagctgctgaatgccaagctgattacccagaggaagttcgacaatctgaccaaggccgagagaggcggcctgagcgaactggataaggccggcttcatcaagagacagctggtggaaacccggcagatcacaaagcacgtggcacagatcctggactcccggatgaacactaagtacgacgagaacgacaaactgatccgggaagtgaaagtgatcaccctgaagtccaagctggtgtccgatttccggaaggatttccagttttacaaagtgcgcgagatcaacaactaccaccacgcccacgacgcctacctgaacgccgtcgtgggaaccgccctgatcaaaaagtaccctaagctggaaagcgagttcgtgtacggcgactacaaggtgtacgacgtgcggaagatgatcgccaagagcgagcaggaaatcggcaaggctaccgccaagtacttcttctacagcaacatcatgaactttttcaagaccgagattaccctggccaacggcgagatccggaagcggcctctgatcgagacaaacggcgaaacaggcgagatcgtgtgggataagggccgggactttgccaccgtgcggaaagtgctgtctatgccccaagtgaatatcgtgaaaaagaccgaggtgcagacaggcggcttcagcaaagagtctatcctgcccaagaggaacagcgacaagctgatcgccagaaagaaggactgggaccctaagaagtacggcggcttcgacagccccaccgtggcctattctgtgctggtggtggccaaagtggaaaagggcaagtccaagaaactgaagagtgtgaaagagctgctggggatcaccatcatggaaagaagcagcttcgagaagaatcccatcgactttctggaagccaagggctacaaagaagtgaaaaaggacctgatcatcaagctgcctaagtactccctgttcgagctggaaaacggccggaagagaatgctggcctctgccggcgaactgcagaagggaaacgaactggccctgccctccaaatatgtgaacttcctgtacctggccagccactatgagaagctgaagggctcccccgaggataatgagcagaaacagctgtttgtggaacagcacaaacactacctggacgagatcatcgagcagatcagcgagttctccaagagagtgatcctggccgacgctaatctggacaaggtgctgagcgcctacaacaagcacagagacaagcctatcagagagcaggccgagaatatcatccacctgtttaccctgaccaatctgggagcccctgccgccttcaagtactttgacaccaccatcgaccggaagaggtacaccagcaccaaagaggtgctggacgccaccctgatccaccagagcatcaccggcctgtacgagacacggatcgacctgtctcagctgggaggcgacgcctatccctatgacgtgcccgattatgccagcctgggcagcggctcccccaagaaaaaacgcaaggtggaagatcctaagaaaaagcggaaagtggacggcagcggcagcgagacccccggtaccagcgagagcgccacccccgagagccggacactcgagatggcggcagccgaggccgcgaactgcatcatggagaattttgtagccaccttggctaatgggatgagcctccagccgcctcttgaagaagtgtcctgtggccaggcggaaagcagtgagaagcccaacgctgaggacatgacatccaaagattactactttgactcctacgcacactttggcatccacgaggagatgctgaaggacgaggtgcgcaccctcacttaccgcaactccatgtttcataaccggcacctcttcaaggacaaggtggtgctggacgtcggctcgggcaccggcatcctctgcatgtttgctgccaaggccggggcccgcaaggtcatcgggatcgagtgttccagtatctctgattatgcggtgaagatcgtcaaagccaacaagttagaccacgtggtgaccatcatcaaggggaaggtggaggaggtggagctcccagtggagaaggtggacatcatcatcagcgagtggatgggctactgcctcttctacgagtccatgctcaacaccgtgctctatgcccgggacaagtggctggcgcccgatggcctcatcttcccagaccgggccacgctgtatgtgacggccatcgaggaccggcagtacaaagactacaagatccactggtgggagaacgtgtatggcttcgacatgtcttgcatcaaagatgtggccattaaggagcccctagtggatgtcgtggaccccaaacagctggtcaccaacgcctgcctcataaaggaggtggacatctataccgtcaaggtggaagacctgaccttcacctccccgttctgcctgcaagtgaagcggaatgactacgtgcacgccctggtggcctacttcaacatcgagttcacacgctgccacaagaggaccggcttctccaccagccccgagtccccgtacacgcactggaagcagacggtgttctacatggaggactacctgaccgtgaagacgggcgaggagatcttcggcaccatcggcatgcggcccaacgccaagaacaaccgggacctggacttcaccatcgacctggacttcaagggccagctgtgcgagctgtcctgctccaccgactaccggatgcgctga

SEQ ID NO: 255 - DNA, 7989 bp, synthetic construct
  misc_feature 1..7989: note = V70 CDS
  source 1..7989: mol_type = other DNA
atgcctgctgctaagagagtgaaactggatggatccaccggtccagccaccatgaaccatgaccaggaatttgaccccccaaaggtttacccacctgtgccagctgagaagaggaagcccatccgcgtgctgtctctctttgatgggattgctacagggctcctggtgctgaaggacctgggcatccaagtggaccgctacattgcctccgaggtgtgtgaggactccatcacggtgggcatggtgcggcaccagggaaagatcatgtacgtcggggacgtccgcagcgtcacacagaagcatatccaggagtggggcccattcgacctggtgattggaggcagtccctgcaatgacctctccattgtcaaccctgcccgcaagggactttatgagggtactggccgcctcttctttgagttctaccgcctcctgcatgatgcgcggcccaaggagggagatgatcgccccttcttctggctctttgagaatgtggtggccatgggcgttagtgacaagagggacatctcgcgatttcttgagtctaaccccgtgatgattgacgccaaagaagtgtctgctgcacacagggcccgttacttctggggtaaccttcctggcatgaacaggcctttggcatccactgtgaatgataagctggagctgcaagagtgtctggagcacggcagaatagccaagttcagcaaagtgaggaccattaccaccaggtcaaactctataaagcagggcaaagaccagcatttccccgtcttcatgaacgagaaggaggacatcctgtggtgcactgaaatggaaagggtgtttggcttccccgtccactacacagacgtctccaacatgagccgcttggcgaggcagagactgctgggccgatcgtggagcgtgccggtcatccgccacctcttcgctccgctgaaggaatattttgcttgtgtgtctagcggcaatagtaacgctaacagccgcgggccgagcttcagcagcggcctggtgccgttaagcttgcgcggcagccatatgggccctatggagatatacaagacagtgtctgcatggaagagacagccagtgcgggtactgagcctcttcagaaacatcgacaaggtactaaagagtttgggcttcttggaaagcggttctggttctgggggaggaacgctgaagtacgtggaagatgtcacaaatgtcgtgaggagagacgtggagaaatggggcccctttgacctggtgtacggctcgacgcagcccctaggcagctcttgtgatcgctgtcccggctggtacatgttccagttccaccggatcctgcagtatgcgctgcctcgccaggagagtcagcggcccttcttctggatattcatggacaatctgctgctgactgaggatgaccaagagacaactacccgcttccttcagacagaggctgtgaccctccaggatgtccgtggcagagactaccagaatgctatgcgggtgtggagcaacattccagggctgaagagcaagcatgcgcccctgaccccaaaggaagaagagtatctgcaagcccaagtcagaagcaggagcaagctggacgccccgaaagttgacctcctggtgaagaactgccttctcccgctgagagagtacttcaagtatttttctcaaaactcacttcctcttggagggccgagctctggcgcacccccaccaagtggagggtctcctgccgggtccccaacatctactgaagaaggcaccagcgaatccgcaacgcccgagtcaggccctggtacctccacagaaccatctgaaggtagtgcgcctggttccccagctggaagccctacttccaccgaagaaggcacgtcaaccgaaccaagtgaaggatctgcccctgggaccagcactgaaccatctgagccaaaaaagaagagaaaggtaatggacaagaagtacagcatcggcctggccatcggcaccaactctgtgggctgggccgtgatcaccgacgagtacaaggtgcccagcaagaaattcaaggtgctgggcaacaccgaccggcacagcatcaagaagaacctgatcggcgccctgctgttcgacagcggagaaacagccgaggccacccggctgaagagaaccgccagaagaagatacaccagacggaagaaccggatctgctatctgcaagagatcttcagcaacgagatggccaaggtggacgacagcttcttccacagactggaagagtccttcctggtggaagaggataagaagcacgagcggcaccccatcttcggcaacatcgtggacgaggtggcctaccacgagaagtaccccaccatctaccacctgagaaagaaactggtggacagcaccgacaaggccgacctgcggctgatctatctggccctggcccacatgatcaagttccggggccacttcctgatcgagggcgacctgaaccccgacaacagcgacgtggacaagctgttcatccagctggtgcagacctacaaccagctgttcgaggaaaaccccatcaacgccagcggcgtggacgccaaggccatcctgtctgccagactgagcaagagcagacggctggaaaatctgatcgcccagctgcccggcgagaagaagaatggcctgttcggcaacctgattgccctgagcctgggcctgacccccaacttcaagagcaacttcgacctggccgaggatgccaaactgcagctgagcaaggacacctacgacgacgacctggacaacctgctggcccagatcggcgaccagtacgccgacctgtttctggccgccaagaacctgtccgacgccatcctgctgagcgacatcctgagagtgaacaccgagatcaccaaggcccccctgagcgcctctatgatcaagagatacgacgagcaccaccaggacctgaccctgctgaaagctctcgtgcggcagcagctgcctgagaagtacaaagagattttcttcgaccagagcaagaacggctacgccggctacatcgatggcggagccagccaggaagagttctacaagttcatcaagcccatcctggaaaagatggacggcaccgaggaactgctcgtgaagctgaacagagaggacctgctgcggaagcagcggaccttcgacaacggcagcatcccccaccagatccacctgggagagctgcacgccattctgcggcggcaggaagatttttacccattcctgaaggacaaccgggaaaagatcgagaagatcctgaccttccgcatcccctactacgtgggccctctggccaggggaaacagcagattcgcctggatgaccagaaagagcgaggaaaccatcaccccctggaacttcgaggaagtggtggacaagggcgccagcgcccagagcttcatcgagcggatgaccaacttcgataagaacctgcccaacgagaaggtgctgcccaagcacagcctgctgtacgagtacttcaccgtgtacaacgagctgaccaaagtgaaatacgtgaccgagggaatgagaaagcccgccttcctgagcggcgagcagaaaaaagccatcgtggacctgctgttcaagaccaaccggaaagtgaccgtgaagcagctgaaagaggactacttcaagaaaatcgagtgcttcgactccgtggaaatctccggcgtggaagatcggttcaacgcctccctgggcacataccacgatctgctgaaaattatcaaggacaaggacttcctggacaatgaggaaaacgaggacattctggaagatatcgtgctgaccctgacactgtttgaggacagagagatgatcgaggaacggctgaaaacctatgcccacctgttcgacgacaaagtgatgaagcagctgaagcggcggagatacaccggctggggcaggctgagccggaagctgatcaacggcatccgggacaagcagtccggcaagacaatcctggatttcctgaagtccgacggcttcgccaacagaaacttcatgcagctgatccacgacgacagcctgacctttaaagaggacatccagaaagcccaggtgtccggccagggcgatagcctgcacgagcacattgccaatctggccggcagccccgccattaagaagggcatcctgcagacagtgaaggtggtggacgagctcgtgaaagtgatgggccggcacaagcccgagaacatcgtgatcgaaatggccagagagaaccagaccacccagaagggacagaagaacagccgcgagagaatgaagcggatcgaagagggcatcaaagagctgggcagccagatcctgaaagaacaccccgtggaaaacacccagctgcagaacgagaagctgtacctgtactacctgcagaatgggcgggatatgtacgtggaccaggaactggacatcaaccggctgtccgactacgatgtggacgctatcgtgcctcagagctttctgaaggacgactccatcgataacaaagtgctgactcggagcgacaagaaccggggcaagagcgacaacgtgccctccgaagaggtcgtgaagaagatgaagaactactggcgccagctgctgaatgccaagctgattacccagaggaagttcgacaatctgaccaaggccgagagaggcggcctgagcgaactggataaggccggcttcatcaagagacagctggtggaaacccggcagatcacaaagcacgtggcacagatcctggactcccggatgaacactaagtacgacgagaacgacaaactgatccgggaagtgaaagtgatcaccctgaagtccaagctggtgtccgatttccggaaggatttccagttttacaaagtgcgcgagatcaacaactaccaccacgcccacgacgcctacctgaacgccgtcgtgggaaccgccctgatcaaaaagtaccctaagctggaaagcgagttcgtgtacggcgactacaaggtgtacgacgtgcggaagatgatcgccaagagcgagcaggaaatcggcaaggctaccgccaagtacttcttctacagcaacatcatgaactttttcaagaccgagattaccctggccaacggcgagatccggaagcggcctctgatcgagacaaacggcgaaacaggcgagatcgtgtgggataagggccgggactttgccaccgtgcggaaagtgctgtctatgccccaagtgaatatcgtgaaaaagaccgaggtgcagacaggcggcttcagcaaagagtctatcctgcccaagaggaacagcgacaagctgatcgccagaaagaaggactgggaccctaagaagtacggcggcttcgacagccccaccgtggcctattctgtgctggtggtggccaaagtggaaaagggcaagtccaagaaactgaagagtgtgaaagagctgctggggatcaccatcatggaaagaagcagcttcgagaagaatcccatcgactttctggaagccaagggctacaaagaagtgaaaaaggacctgatcatcaagctgcctaagtactccctgttcgagctggaaaacggccggaagagaatgctggcctctgccggcgaactgcagaagggaaacgaactggccctgccctccaaatatgtgaacttcctgtacctggccagccactatgagaagctgaagggctcccccgaggataatgagcagaaacagctgtttgtggaacagcacaaacactacctggacgagatcatcgagcagatcagcgagttctccaagagagtgatcctggccgacgctaatctggacaaggtgctgagcgcctacaacaagcacagagacaagcctatcagagagcaggccgagaatatcatccacctgtttaccctgaccaatctgggagcccctgccgccttcaagtactttgacaccaccatcgaccggaagaggtacaccagcaccaaagaggtgctggacgccaccctgatccaccagagcatcaccggcctgtacgagacacggatcgacctgtctcagctgggaggcgacgcctatccctatgacgtgcccgattatgccagcctgggcagcggctcccccaagaaaaaacgcaaggtggaagatcctaagaaaaagcggaaagtggacggcagcggcagcgagacccccggtaccagcgagagcgccacccccgagagccggacactcgagacccctccaccccaggtggcctacagcaaggaacgtatcccgggcaagggtgttttcattaacacaggccctgaatttctggttggctgtgactgcaaggatgggtgtcgggacaagtccaagtgtgcctgccatcaactaactatccaggctacagcctgtaccccaggaggccaaatcaaccctaactctggctaccagtacaagagactagaagagtgtctacccacaggggtatatgagtgtaacaaacgctgcaaatgtgacccaaacatgtgcacaaaccggttggtgcaacatggactacaagttcggctacagctattcaagacacagaacaagggctggggtatccgctgcttggatgacattgccaaaggctcttttgtttgtatttatgcaggcaaaatcctgacagatgactttgcagacaaggagggtctggaaatgggtgatgagtactttgcaaatctggaccatatcgagagcgtggagaacttcaaagaaggatatgagagtgatgccccctgttcctctgacagcagtggtgtagacttgaaggaccaggaagatggcaacagcggtacagaggaccctgaagagtccaatgatgatagctcagatgataacttctgtaaggatgaggacttcagcaccagttcagtgtggcggagctatgctacccggaggcagacccggggccagaaagagaacggactctctgagacaacttccaaggactcccaccccccagatcttggacccccacatattcctgttcctccctcaatccctgtaggtggctgcaatccaccttcctccgaagagacacccaagaacaaggtggcctcatggttgagctgcaatagtgtcagtgaaggtggttttgctgactctgatagccattcatccttcaagactaatgaaggtggggagggccgggctgggggaagccgaatggaggctgagaaggcctccacctcaggactaggcatcaaggatgagggagacatcaaacaggccaagaaagaggacactgacgaccgaaacaagatgtcagtagttactgaaagctctcgaaattacggttacaatccttctcctgtgaagcctgaaggacttcgccgcccacctagtaagactagtatgcatcaaagccgaagactcatggcttctgctcagtccaaccctgatgatgtcctgacactgtccagcagcacagaaagtgagggggaaagtgggaccagccgaaagcccactgctggtcagacttcggctacagcggttgacagtgatgatatccagaccatatcctctggctctgaaggggatgactttgaggacaagaagaacatgactggtccaatgaagcgtcaagtggcagtaaaatcaacccgaggctttgctcttaaatcaacccatgggattgcaattaaatcaaccaacatggcctctgtggacaagggggagagcgcacctgttcgtaagaacacacgccaattctatgatggcgaggagtcttgctacatcattgatgccaagcttgaaggcaacctgggccgctacctcaaccacagttgcagccccaacctgtttgtccagaatgtcttcgtggatacccatgatcttcgcttcccctgggtggccttctttgccagcaaaagaatccgggctgggacagaacttacttgggactacaactacgaggtgggcagtgtggaaggcaaggagctactctgttgctgtggggccattgaatgcagaggacgtcttctttga

SEQ ID NO: 256 - DNA, 7116 bp, synthetic construct
  misc_feature 1..7116: note = V71 CDS
  source 1..7116: mol_type = other DNA
atgcctgctgctaagagagtgaaactggatggatccaccggtccagccaccatgaaccatgaccaggaatttgaccccccaaaggtttacccacctgtgccagctgagaagaggaagcccatccgcgtgctgtctctctttgatgggattgctacagggctcctggtgctgaaggacctgggcatccaagtggaccgctacattgcctccgaggtgtgtgaggactccatcacggtgggcatggtgcggcaccagggaaagatcatgtacgtcggggacgtccgcagcgtcacacagaagcatatccaggagtggggcccattcgacctggtgattggaggcagtccctgcaatgacctctccattgtcaaccctgcccgcaagggactttatgagggtactggccgcctcttctttgagttctaccgcctcctgcatgatgcgcggcccaaggagggagatgatcgccccttcttctggctctttgagaatgtggtggccatgggcgttagtgacaagagggacatctcgcgatttcttgagtctaaccccgtgatgattgacgccaaagaagtgtctgctgcacacagggcccgttacttctggggtaaccttcctggcatgaacaggcctttggcatccactgtgaatgataagctggagctgcaagagtgtctggagcacggcagaatagccaagttcagcaaagtgaggaccattaccaccaggtcaaactctataaagcagggcaaagaccagcatttccccgtcttcatgaacgagaaggaggacatcctgtggtgcactgaaatggaaagggtgtttggcttccccgtccactacacagacgtctccaacatgagccgcttggcgaggcagagactgctgggccgatcgtggagcgtgccggtcatccgccacctcttcgctccgctgaaggaatattttgcttgtgtgtctagcggcaatagtaacgctaacagccgcgggccgagcttcagcagcggcctggtgccgttaagcttgcgcggcagccatatgggccctatggagatatacaagacagtgtctgcatggaagagacagccagtgcgggtactgagcctcttcagaaacatcgacaaggtactaaagagtttgggcttcttggaaagcggttctggttctgggggaggaacgctgaagtacgtggaagatgtcacaaatgtcgtgaggagagacgtggagaaatggggcccctttgacctggtgtacggctcgacgcagcccctaggcagctcttgtgatcgctgtcccggctggtacatgttccagttccaccggatcctgcagtatgcgctgcctcgccaggagagtcagcggcccttcttctggatattcatggacaatctgctgctgactgaggatgaccaagagacaactacccgcttccttcagacagaggctgtgaccctccaggatgtccgtggcagagactaccagaatgctatgcgggtgtggagcaacattccagggctgaagagcaagcatgcgcccctgaccccaaaggaagaagagtatctgcaagcccaagtcagaagcaggagcaagctggacgccccgaaagttgacctcctggtgaagaactgccttctcccgctgagagagtacttcaagtatttttctcaaaactcacttcctcttggagggccgagctctggcgcacccccaccaagtggagggtctcctgccgggtccccaacatctactgaagaaggcaccagcgaatccgcaacgcccgagtcaggccctggtacctccacagaaccatctgaaggtagtgcgcctggttccccagctggaagccctacttccaccgaagaaggcacgtcaaccgaaccaagtgaaggatctgcccctgggaccagcactgaaccatctgagccaaaaaagaagagaaaggtaatggacaagaagtacagcatcggcctggccatcggcaccaactctgtgggctgggccgtgatcaccgacgagtacaaggtgcccagcaagaaattcaaggtgctgggcaacaccgaccggcacagcatcaagaagaacctgatcggcgccctgctgttcgacagcggagaaacagccgaggccacccggctgaagagaaccgccagaagaagatacaccagacggaagaaccggatctgctatctgcaagagatcttcagcaacgagatggccaaggtggacgacagcttcttccacagactggaagagtccttcctggtggaagaggataagaagcacgagcggcaccccatcttcggcaacatcgtggacgaggtggcctaccacgagaagtaccccaccatctaccacctgagaaagaaactggtggacagcaccgacaaggccgacctgcggctgatctatctggccctggcccacatgatcaagttccggggccacttcctgatcgagggcgacctgaaccccgacaacagcgacgtggacaagctgttcatccagctggtgcagacctacaaccagctgttcgaggaaaaccccatcaacgccagcggcgtggacgccaaggccatcctgtctgccagactgagcaagagcagacggctggaaaatctgatcgcccagctgcccggcgagaagaagaatggcctgttcggcaacctgattgccctgagcctgggcctgacccccaacttcaagagcaacttcgacctggccgaggatgccaaactgcagctgagcaaggacacctacgacgacgacctggacaacctgctggcccagatcggcgaccagtacgccgacctgtttctggccgccaagaacctgtccgacgccatcctgctgagcgacatcctgagagtgaacaccgagatcaccaaggcccccctgagcgcctctatgatcaagagatacgacgagcaccaccaggacctgaccctgctgaaagctctcgtgcggcagcagctgcctgagaagtacaaagagattttcttcgaccagagcaagaacggctacgccggctacatcgatggcggagccagccaggaagagttctacaagttcatcaagcccatcctggaaaagatggacggcaccgaggaactgctcgtgaagctgaacagagaggacctgctgcggaagcagcggaccttcgacaacggcagcatcccccaccagatccacctgggagagctgcacgccattctgcggcggcaggaagatttttacccattcctgaaggacaaccgggaaaagatcgagaagatcctgaccttccgcatcccctactacgtgggccctctggccaggggaaacagcagattcgcctggatgaccagaaagagcgaggaaaccatcaccccctggaacttcgaggaagtggtggacaagggcgccagcgcccagagcttcatcgagcggatgaccaacttcgataagaacctgcccaacgagaaggtgctgcccaagcacagcctgctgtacgagtacttcaccgtgtacaacgagctgaccaaagtgaaatacgtgaccgagggaatgagaaagcccgccttcctgagcggcgagcagaaaaaagccatcgtggacctgctgttcaagaccaaccggaaagtgaccgtgaagcagctgaaagaggactacttcaagaaaatcgagtgcttcgactccgtggaaatctccggcgtggaagatcggttcaacgcctccctgggcacataccacgatctgctgaaaattatcaaggacaaggacttcctggacaatgaggaaaacgaggacattctggaagatatcgtgctgaccctgacactgtttgaggacagagagatgatcgaggaacggctgaaaacctatgcccacctgttcgacgacaaagtgatgaagcagctgaagcggcggagatacaccggctggggcaggctgagccggaagctgatcaacggcatccgggacaagcagtccggcaagacaatcctggatttcctgaagtccgacggcttcgccaacagaaacttcatgcagctgatccacgacgacagcctgacctttaaagaggacatccagaaagcccaggtgtccggccagggcgatagcctgcacgagcacattgccaatctggccggcagccccgccattaagaagggcatcctgcagacagtgaaggtggtggacgagctcgtgaaagtgatgggccggcacaagcccgagaacatcgtgatcgaaatggccagagagaaccagaccacccagaagggacagaagaacagccgcgagagaatgaagcggatcgaagagggcatcaaagagctgggcagccagatcctgaaagaacaccccgtggaaaacacccagctgcagaacgagaagctgtacctgtactacctgcagaatgggcgggatatgtacgtggaccaggaactggacatcaaccggctgtccgactacgatgtggacgctatcgtgcctcagagctttctgaaggacgactccatcgataacaaagtgctgactcggagcgacaagaaccggggcaagagcgacaacgtgccctccgaagaggtcgtgaagaagatgaagaactactggcgccagctgctgaatgccaagctgattacccagaggaagttcgacaatctgaccaaggccgagagaggcggcctgagcgaactggataaggccggcttcatcaagagacagctggtggaaacccggcagatcacaaagcacgtggcacagatcctggactcccggatgaacactaagtacgacgagaacgacaaactgatccgggaagtgaaagtgatcaccctgaagtccaagctggtgtccgatttccggaaggatttccagttttacaaagtgcgcgagatcaacaactaccaccacgcccacgacgcctacctgaacgccgtcgtgggaaccgccctgatcaaaaagtaccctaagctggaaagcgagttcgtgtacggcgactacaaggtgtacgacgtgcggaagatgatcgccaagagcgagcaggaaatcggcaaggctaccgccaagtacttcttctacagcaacatcatgaactttttcaagaccgagattaccctggccaacggcgagatccggaagcggcctctgatcgagacaaacggcgaaacaggcgagatcgtgtgggataagggccgggactttgccaccgtgcggaaagtgctgtctatgccccaagtgaatatcgtgaaaaagaccgaggtgcagacaggcggcttcagcaaagagtctatcctgcccaagaggaacagcgacaagctgatcgccagaaagaaggactgggaccctaagaagtacggcggcttcgacagccccaccgtggcctattctgtgctggtggtggccaaagtggaaaagggcaagtccaagaaactgaagagtgtgaaagagctgctggggatcaccatcatggaaagaagcagcttcgagaagaatcccatcgactttctggaagccaagggctacaaagaagtgaaaaaggacctgatcatcaagctgcctaagtactccctgttcgagctggaaaacggccggaagagaatgctggcctctgccggcgaactgcagaagggaaacgaactggccctgccctccaaatatgtgaacttcctgtacctggccagccactatgagaagctgaagggctcccccgaggataatgagcagaaacagctgtttgtggaacagcacaaacactacctggacgagatcatcgagcagatcagcgagttctccaagagagtgatcctggccgacgctaatctggacaaggtgctgagcgcctacaacaagcacagagacaagcctatcagagagcaggccgagaatatcatccacctgtttaccctgaccaatctgggagcccctgccgccttcaagtactttgacaccaccatcgaccggaagaggtacaccagcaccaaagaggtgctggacgccaccctgatccaccagagcatcaccggcctgtacgagacacggatcgacctgtctcagctgggaggcgacgcctatccctatgacgtgcccgattatgccagcctgggcagcggctcccccaagaaaaaacgcaaggtggaagatcctaagaaaaagcggaaagtggacggcagcggcagcgagacccccggtaccagcgagagcgccacccccgagagccggacactcgagacaattcttaaagatttattgccggaaacaatacctccacctgagttggatgatatgacactgtggcagattgttattaatatcctttcagaaccaccaaaaaggaaaaaaagaaaagatattaatacaattgaagatgctgtgaaattactgcaagagtgcaaaaaaattatagttctaactggagctggggtgtctgtttcatgtggaatacctgacttcaggtcaagggatggtatttatgctcgccttgctgtagacttcccagatcttccagatcctcaagcgatgtttgatattgaatatttcagaaaagatccaagaccattcttcaagtttgcaaaggaaatatatcctggacaattccagccatctctctgtcacaaattcatagccttgtcagataaggaaggaaaactacttcgcaactatacccagaacatagacacgctggaacaggttgcgggaatccaaaggataattcagtgtcatggttcctttgcaacagcatcttgcctgatttgtaaatacaaagttgactgtgaagctgtacgaggagatatttttaatcaggtagttcctcgatgtcctaggtgcccagctgatgaaccgcttgctatcatgaaaccagagattgtgttttttggtgaaaatttaccagaacagtttcatagagccatgaagtatgacaaagatgaagttgacctcctcattgttattgggtcttccctcaaagtaagaccagtagcactaattccaagttccataccccatgaagtgcctcagatattaattaatagagaacctttgcctcatctgcattttgatgtagagcttcttggagactgtgatgtcataattaatgaattgtgtcataggttaggtggtgaatatgccaaactttga

SEQ ID NO: 257 - DNA, 8124 bp, synthetic construct
  misc_feature 1..8124: note = V72 CDS
  source 1..8124: mol_type = other DNA
atgcctgctgctaagagagtgaaactggatggatccaccggtccagccaccatgaaccatgaccaggaatttgaccccccaaaggtttacccacctgtgccagctgagaagaggaagcccatccgcgtgctgtctctctttgatgggattgctacagggctcctggtgctgaaggacctgggcatccaagtggaccgctacattgcctccgaggtgtgtgaggactccatcacggtgggcatggtgcggcaccagggaaagatcatgtacgtcggggacgtccgcagcgtcacacagaagcatatccaggagtggggcccattcgacctggtgattggaggcagtccctgcaatgacctctccattgtcaaccctgcccgcaagggactttatgagggtactggccgcctcttctttgagttctaccgcctcctgcatgatgcgcggcccaaggagggagatgatcgccccttcttctggctctttgagaatgtggtggccatgggcgttagtgacaagagggacatctcgcgatttcttgagtctaaccccgtgatgattgacgccaaagaagtgtctgctgcacacagggcccgttacttctggggtaaccttcctggcatgaacaggcctttggcatccactgtgaatgataagctggagctgcaagagtgtctggagcacggcagaatagccaagttcagcaaagtgaggaccattaccaccaggtcaaactctataaagcagggcaaagaccagcatttccccgtcttcatgaacgagaaggaggacatcctgtggtgcactgaaatggaaagggtgtttggcttccccgtccactacacagacgtctccaacatgagccgcttggcgaggcagagactgctgggccgatcgtggagcgtgccggtcatccgccacctcttcgctccgctgaaggaatattttgcttgtgtgtctagcggcaatagtaacgctaacagccgcgggccgagcttcagcagcggcctggtgccgttaagcttgcgcggcagccatatgggccctatggagatatacaagacagtgtctgcatggaagagacagccagtgcgggtactgagcctcttcagaaacatcgacaaggtactaaagagtttgggcttcttggaaagcggttctggttctgggggaggaacgctgaagtacgtggaagatgtcacaaatgtcgtgaggagagacgtggagaaatggggcccctttgacctggtgtacggctcgacgcagcccctaggcagctcttgtgatcgctgtcccggctggtacatgttccagttccaccggatcctgcagtatgcgctgcctcgccaggagagtcagcggcccttcttctggatattcatggacaatctgctgctgactgaggatgaccaagagacaactacccgcttccttcagacagaggctgtgaccctccaggatgtccgtggcagagactaccagaatgctatgcgggtgtggagcaacattccagggctgaagagcaagcatgcgcccctgaccccaaaggaagaagagtatctgcaagcccaagtcagaagcaggagcaagctggacgccccgaaagttgacctcctggtgaagaactgccttctcccgctgagagagtacttcaagtatttttctcaaaactcacttcctcttggagggccgagctctggcgcacccccaccaagtggagggtctcctgccgggtccccaacatctactgaagaaggcaccagcgaatccgcaacgcccgagtcaggccctggtacctccacagaaccatctgaaggtagtgcgcctggttccccagctggaagccctacttccaccgaagaaggcacgtcaaccgaaccaagtgaaggatctgcccctgggaccagcactgaaccatctgagccaaaaaagaagagaaaggtaatggacaagaagtacagcatcggcctggccatcggcaccaactctgtgggctgggccgtgatcaccgacgagtacaaggtgcccagcaagaaattcaaggtgctgggcaacaccgaccggcacagcatcaagaagaacctgatcggcgccctgctgttcgacagcggagaaacagccgaggccacccggctgaagagaaccgccagaagaagatacaccagacggaagaaccggatctgctatctgcaagagatcttcagcaacgagatggccaaggtggacgacagcttcttccacagactggaagagtccttcctggtggaagaggataagaagcacgagcggcaccccatcttcggcaacatcgtggacgaggtggcctaccacgagaagtaccccaccatctaccacctgagaaagaaactggtggacagcaccgacaaggccgacctgcggctgatctatctggccctggcccacatgatcaagttccggggccacttcctgatcgagggcgacctgaaccccgacaacagcgacgtggacaagctgttcatccagctggtgcagacctacaaccagctgttcgaggaaaaccccatcaacgccagcggcgtggacgccaaggccatcctgtctgccagactgagcaagagcagacggctggaaaatctgatcgcccagctgcccggcgagaagaagaatggcctgttcggcaacctgattgccctgagcctgggcctgacccccaacttcaagagcaacttcgacctggccgaggatgccaaactgcagctgagcaaggacacctacgacgacgacctggacaacctgctggcccagatcggcgaccagtacgccgacctgtttctggccgccaagaacctgtccgacgccatcctgctgagcgacatcctgagagtgaacaccgagatcaccaaggcccccctgagcgcctctatgatcaagagatacgacgagcaccaccaggacctgaccctgctgaaagctctcgtgcggcagcagctgcctgagaagtacaaagagattttcttcgaccagagcaagaacggctacgccggctacatcgatggcggagccagccaggaagagttctacaagttcatcaagcccatcctggaaaagatggacggcaccgaggaactgctcgtgaagctgaacagagaggacctgctgcggaagcagcggaccttcgacaacggcagcatcccccaccagatccacctgggagagctgcacgccattctgcggcggcaggaagatttttacccattcctgaaggacaaccgggaaaagatcgagaagatcctgaccttccgcatcccctactacgtgggccctctggccaggggaaacagcagattcgcctggatgaccagaaagagcgaggaaaccatcaccccctggaacttcgaggaagtggtggacaagggcgccagcgcccagagcttcatcgagcggatgaccaacttcgataagaacctgcccaacgagaaggtgctgcccaagcacagcctgctgtacgagtacttcaccgtgtacaacgagctgaccaaagtgaaatacgtgaccgagggaatgagaaagcccgccttcctgagcggcgagcagaaaaaagccatcgtggacctgctgttcaagaccaaccggaaagtgaccgtgaagcagctgaaagaggactacttcaagaaaatcgagtgcttcgactccgtggaaatctccggcgtggaagatcggttcaacgcctccctgggcacataccacgatctgctgaaaattatcaaggacaaggacttcctggacaatgaggaaaacgaggacattctggaagatatcgtgctgaccctgacactgtttgaggacagagagatgatcgaggaacggctgaaaacctatgcccacctgttcgacgacaaagtgatgaagcagctgaagcggcggagatacaccggctggggcaggctgagccggaagctgatcaacggcatccgggacaagcagtccggcaagacaatcctggatttcctgaagtccgacggcttcgccaacagaaacttcatgcagctgatccacgacgacagcctgacctttaaagaggacatccagaaagcccaggtgtccggccagggcgatagcctgcacgagcacattgccaatctggccggcagccccgccattaagaagggcatcctgcagacagtgaaggtggtggacgagctcgtgaaagtgatgggccggcacaagcccgagaacatcgtgatcgaaatggccagagagaaccagaccacccagaagggacagaagaacagccgcgagagaatgaagcggatcgaagagggcatcaaagagctgggcagccagatcctgaaagaacaccccgtggaaaacacccagctgcagaacgagaagctgtacctgtactacctgcagaatgggcgggatatgtacgtggaccaggaactggacatcaaccggctgtccgactacgatgtggacgctatcgtgcctcagagctttctgaaggacgactccatcgataacaaagtgctgactcggagcgacaagaaccggggcaagagcgacaacgtgccctccgaagaggtcgtgaagaagatgaagaactactggcgccagctgctgaatgccaagctgattacccagaggaagttcgacaatctgaccaaggccgagagaggcggcctgagcgaactggataaggccggcttcatcaagagacagctggtggaaacccggcagatcacaaagcacgtggcacagatcctggactcccggatgaacactaagtacgacgagaacgacaaactgatccgggaagtgaaagtgatcaccctgaagtccaagctggtgtccgatttccggaaggatttccagttttacaaagtgcgcgagatcaacaactaccaccacgcccacgacgcctacctgaacgccgtcgtgggaaccgccctgatcaaaaagtaccctaagctggaaagcgagttcgtgtacggcgactacaaggtgtacgacgtgcggaagatgatcgccaagagcgagcaggaaatcggcaaggctaccgccaagtacttcttctacagcaacatcatgaactttttcaagaccgagattaccctggccaacggcgagatccggaagcggcctctgatcgagacaaacggcgaaacaggcgagatcgtgtgggataagggccgggactttgccaccgtgcggaaagtgctgtctatgccccaagtgaatatcgtgaaaaagaccgaggtgcagacaggcggcttcagcaaagagtctatcctgcccaagaggaacagcgacaagctgatcgccagaaagaaggactgggaccctaagaagtacggcggcttcgacagccccaccgtggcctattctgtgctggtggtggccaaagtggaaaagggcaagtccaagaaactgaagagtgtgaaagagctgctggggatcaccatcatggaaagaagcagcttcgagaagaatcccatcgactttctggaagccaagggctacaaagaagtgaaaaaggacctgatcatcaagctgcctaagtactccctgttcgagctggaaaacggccggaagagaatgctggcctctgccggcgaactgcagaagggaaacgaactggccctgccctccaaatatgtgaacttcctgtacctggccagccactatgagaagctgaagggctcccccgaggataatgagcagaaacagctgtttgtggaacagcacaaacactacctggacgagatcatcgagcagatcagcgagttctccaagagagtgatcctggccgacgctaatctggacaaggtgctgagcgcctacaacaagcacagagacaagcctatcagagagcaggccgagaatatcatccacctgtttaccctgaccaatctgggagcccctgccgccttcaagtactttgacaccaccatcgaccggaagaggtacaccagcaccaaagaggtgctggacgccaccctgatccaccagagcatcaccggcctgtacgagacacggatcgacctgtctcagctgggaggcgacgcctatccctatgacgtgcccgattatgccagcctgggcagcggctcccccaagaaaaaacgcaaggtggaagatcctaagaaaaagcggaaagtggacggcagcggcagcgagacccccggtaccagcgagagcgccacccccgagagccggacactcgagatggcggcgatggcggtcgggggtgctggtgggagccgcgtgtccagcgggagggacctgaattgcgtccccgaaatagctgacacactaggggctgtggccaagcaggggtttgatttcctctgcatgcctgtcttccatccgcgtttcaagagggagttcattcaggaacctgctaagaatcggcccggtccccagacacgatcagacctactgctgtcaggaagggactggaatacgctaattgtgggaaagctttctccatggattcgtccagactcaaaagtggagaagattcgcaggaactccgaggcggccatgttacaggagctgaattttggtgcatatttgggtcttccagctttcctgctgccccttaatcaggaagataacaccaacctggccagagttttgaccaaccacatccacactggccatcactcttccatgttctggatgcgggtacccttggtggcaccagaggacctgagagatgatataattgagaatgcaccaactacacacacagaggagtacagtggggaggagaaaacgtggatgtggtggcacaacttccggactttgtgtgactatagtaagaggattgcagtggctcttgaaattggggctgacctcccatctaatcatgtcattgatcgctggcttggggagcccatcaaagcagccattctccccactagcattttcctgaccaataagaagggatttcctgttctttctaagatgcaccagaggctcatcttccggctcctcaagttggaggtgcagttcatcatcacaggcaccaaccaccactcagagaaggagttctgctcctacctccaatacctggaatacttaagccagaaccgtcctccacctaatgcctatgaactctttgccaagggctatgaagactatctgcagtccccgcttcagccactgatggacaatctggaatctcagacatatgaagtgtttgaaaaggaccccatcaaatactctcagtaccagcaggccatctataaatgtctgctagaccgagtaccagaagaggagaaggataccaatgtccaggtactgatggtgctgggagcaggacggggacccctggtgaacgcttccctgcgggcagccaagcaggccgaccggcggataaagctgtatgctgtggagaaaaacccaaatgccgtggtgacgctagagaactggcagtttgaagaatggggaagccaagtgaccgtagtctcatcagacatgagggaatgggtggctccagagaaagcagacatcattgtcagtgagcttctgggctcatttgctgacaatgaattgtcgcctgagtgcctggatggagcccagcacttcctaaaagatgatggtgtgagcatccccggggagtacacttcctttctggctcccatctcttcctccaagctgtacaatgaggtccgagcctgtagggagaaggaccgtgaccctgaggcccagtttgagatgccttatgtggtacggctgcacaacttccaccagctctctgcaccccagccctgtttcaccttcagccatcccaacagagatcctatgattgacaacaaccgctattgcaccttggaatttcctgtggaggtgaacacagtactacatggctttgccggctactttgagactgtgctttatcaggacatcactctgagtatccgtccagagactcactctcctgggatgttctcatggtttcccatcctcttccctattaagcagcccataacggtacgtgaaggccaaaccatctgtgtgcgtttctggcgatgcagcaattccaagaaggtgtggtatgagtgggctgtgacagcaccagtctgttctgctattcataaccccacaggccgctcatataccattggcctctga

SEQ ID NO: 258 - DNA, 6780 bp, synthetic construct
  misc_feature 1..6780: note = V73 CDS
  source 1..6780: mol_type = other DNA
atgcctgctgctaagagagtgaaactggatggatccaccggtccagccaccatgaaccatgaccaggaatttgaccccccaaaggtttacccacctgtgccagctgagaagaggaagcccatccgcgtgctgtctctctttgatgggattgctacagggctcctggtgctgaaggacctgggcatccaagtggaccgctacattgcctccgaggtgtgtgaggactccatcacggtgggcatggtgcggcaccagggaaagatcatgtacgtcggggacgtccgcagcgtcacacagaagcatatccaggagtggggcccattcgacctggtgattggaggcagtccctgcaatgacctctccattgtcaaccctgcccgcaagggactttatgagggtactggccgcctcttctttgagttctaccgcctcctgcatgatgcgcggcccaaggagggagatgatcgccccttcttctggctctttgagaatgtggtggccatgggcgttagtgacaagagggacatctcgcgatttcttgagtctaaccccgtgatgattgacgccaaagaagtgtctgctgcacacagggcccgttacttctggggtaaccttcctggcatgaacaggcctttggcatccactgtgaatgataagctggagctgcaagagtgtctggagcacggcagaatagccaagttcagcaaagtgaggaccattaccaccaggtcaaactctataaagcagggcaaagaccagcatttccccgtcttcatgaacgagaaggaggacatcctgtggtgcactgaaatggaaagggtgtttggcttccccgtccactacacagacgtctccaacatgagccgcttggcgaggcagagactgctgggccgatcgtggagcgtgccggtcatccgccacctcttcgctccgctgaaggaatattttgcttgtgtgtctagcggcaatagtaacgctaacagccgcgggccgagcttcagcagcggcctggtgccgttaagcttgcgcggcagccatatgggccctatggagatatacaagacagtgtctgcatggaagagacagccagtgcgggtactgagcctcttcagaaacatcgacaaggtactaaagagtttgggcttcttggaaagcggttctggttctgggggaggaacgctgaagtacgtggaagatgtcacaaatgtcgtgaggagagacgtggagaaatggggcccctttgacctggtgtacggctcgacgcagcccctaggcagctcttgtgatcgctgtcccggctggtacatgttccagttccaccggatcctgcagtatgcgctgcctcgccaggagagtcagcggcccttcttctggatattcatggacaatctgctgctgactgaggatgaccaagagacaactacccgcttccttcagacagaggctgtgaccctccaggatgtccgtggcagagactaccagaatgctatgcgggtgtggagcaacattccagggctgaagagcaagcatgcgcccctgaccccaaaggaagaagagtatctgcaagcccaagtcagaagcaggagcaagctggacgccccgaaagttgacctcctggtgaagaactgccttctcccgctgagagagtacttcaagtatttttctcaaaactcacttcctcttggagggccgagctctggcgcacccccaccaagtggagggtctcctgccgggtccccaacatctactgaagaaggcaccagcgaatccgcaacgcccgagtcaggccctggtacctccacagaaccatctgaaggtagtgcgcctggttccccagctggaagccctacttccaccgaagaaggcacgtcaaccgaaccaagtgaaggatctgcccctgggaccagcactgaaccatctgagccaaaaaagaagagaaaggtaatggacaagaagtacagcatcggcctggccatcggcaccaactctgtgggctgggccgtgatcaccgacgagtacaaggtgcccagcaagaaattcaaggtgctgggcaacaccgaccggcacagcatcaagaagaacctgatcggcgccctgctgttcgacagcggagaaacagccgaggccacccggctgaagagaaccgccagaagaagatacaccagacggaagaaccggatctgctatctgcaagagatcttcagcaacgagatggccaaggtggacgacagcttcttccacagactggaagagtccttcctggtggaagaggataagaagcacgagcggcaccccatcttcggcaacatcgtggacgaggtggcctaccacgagaagtaccccaccatctaccacctgagaaagaaactggtggacagcaccgacaaggccgacctgcggctgatctatctggccctggcccacatgatcaagttccggggccacttcctgatcgagggcgacctgaaccccgacaacagcgacgtggacaagctgttcatccagctggtgcagacctacaaccagctgttcgaggaaaaccccatcaacgccagcggcgtggacgccaaggccatcctgtctgccagactgagcaagagcagacggctggaaaatctgatcgcccagctgcccggcgagaagaagaatggcctgttcggcaacctgattgccctgagcctgggcctgacccccaacttcaagagcaacttcgacctggccgaggatgccaaactgcagctgagcaaggacacctacgacgacgacctggacaacctgctggcccagatcggcgaccagtacgccgacctgtttctggccgccaagaacctgtccgacgccatcctgctgagcgacatcctgagagtgaacaccgagatcaccaaggcccccctgagcgcctctatgatcaagagatacgacgagcaccaccaggacctgaccctgctgaaagctctcgtgcggcagcagctgcctgagaagtacaaagagattttcttcgaccagagcaagaacggctacgccggctacatcgatggcggagccagccaggaagagttctacaagttcatcaagcccatcctggaaaagatggacggcaccgaggaactgctcgtgaagctgaacagagaggacctgctgcggaagcagcggaccttcgacaacggcagcatcccccaccagatccacctgggagagctgcacgccattctgcggcggcaggaagatttttacccattcctgaaggacaaccgggaaaagatcgagaagatcctgaccttccgcatcccctactacgtgggccctctggccaggggaaacagcagattcgcctggatgaccagaaagagcgaggaaaccatcaccccctggaacttcgaggaagtggtggacaagggcgccagcgcccagagcttcatcgagcggatgaccaacttcgataagaacctgcccaacgagaaggtgctgcccaagcacagcctgctgtacgagtacttcaccgtgtacaacgagctgaccaaagtgaaatacgtgaccgagggaatgagaaagcccgccttcctgagcggcgagcagaaaaaagccatcgtggacctgctgttcaagaccaaccggaaagtgaccgtgaagcagctgaaagaggactacttcaagaaaatcgagtgcttcgactccgtggaaatctccggcgtggaagatcggttcaacgcctccctgggcacataccacgatctgctgaaaattatcaaggacaaggacttcctggacaatgaggaaaacgaggacattctggaagatatcgtgctgaccctgacactgtttgaggacagagagatgatcgaggaacggctgaaaacctatgcccacctgttcgacgacaaagtgatgaagcagctgaagcggcggagatacaccggctggggcaggctgagccggaagctgatcaacggcatccgggacaagcagtccggcaagacaatcctggatttcctgaagtccgacggcttcgccaacagaaacttcatgcagctgatccacgacgacagcctgacctttaaagaggacatccagaaagcccaggtgtccggccagggcgatagcctgcacgagcacattgccaatctggccggcagccccgccattaagaagggcatcctgcagacagtgaaggtggtggacgagctcgtgaaagtgatgggccggcacaagcccgagaacatcgtgatcgaaatggccagagagaaccagaccacccagaagggacagaagaacagccgcgagagaatgaagcggatcgaagagggcatcaaagagctgggcagccagatcctgaaagaacaccccgtggaaaacacccagctgcagaacgagaagctgtacctgtactacctgcagaatgggcgggatatgtacgtggaccaggaactggacatcaaccggctgtccgactacgatgtggacgctatcgtgcctcagagctttctgaaggacgactccatcgataacaaagtgctgactcggagcgacaagaaccggggcaagagcgacaacgtgccctccgaagaggtcgtgaagaagatgaagaactactggcgccagctgctgaatgccaagctgattacccagaggaagttcgacaatctgaccaaggccgagagaggcggcctgagcgaactggataaggccggcttcatcaagagacagctggtggaaacccggcagatcacaaagcacgtggcacagatcctggactcccggatgaacactaagtacgacgagaacgacaaactgatccgggaagtgaaagtgatcaccctgaagtccaagctggtgtccgatttccggaaggatttccagttttacaaagtgcgcgagatcaacaactaccaccacgcccacgacgcctacctgaacgccgtcgtgggaaccgccctgatcaaaaagtaccctaagctggaaagcgagttcgtgtacggcgactacaaggtgtacgacgtgcggaagatgatcgccaagagcgagcaggaaatcggcaaggctaccgccaagtacttcttctacagcaacatcatgaactttttcaagaccgagattaccctggccaacggcgagatccggaagcggcctctgatcgagacaaacggcgaaacaggcgagatcgtgtgggataagggccgggactttgccaccgtgcggaaagtgctgtctatgccccaagtgaatatcgtgaaaaagaccgaggtgcagacaggcggcttcagcaaagagtctatcctgcccaagaggaacagcgacaagctgatcgccagaaagaaggactgggaccctaagaagtacggcggcttcgacagccccaccgtggcctattctgtgctggtggtggccaaagtggaaaagggcaagtccaagaaactgaagagtgtgaaagagctgctggggatcaccatcatggaaagaagcagcttcgagaagaatcccatcgactttctggaagccaagggctacaaagaagtgaaaaaggacctgatcatcaagctgcctaagtactccctgttcgagctggaaaacggccggaagagaatgctggcctctgccggcgaactgcagaagggaaacgaactggccctgccctccaaatatgtgaacttcctgtacctggccagccactatgagaagctgaagggctcccccgaggataatgagcagaaacagctgtttgtggaacagcacaaacactacctggacgagatcatcgagcagatcagcgagttctccaagagagtgatcctggccgacgctaatctggacaaggtgctgagcgcctacaacaagcacagagacaagcctatcagagagcaggccgagaatatcatccacctgtttaccctgaccaatctgggagcccctgccgccttcaagtactttgacaccaccatcgaccggaagaggtacaccagcaccaaagaggtgctggacgccaccctgatccaccagagcatcaccggcctgtacgagacacggatcgacctgtctcagctgggaggcgacgcctatccctatgacgtgcccgattatgccagcctgggcagcggctcccccaagaaaaaacgcaaggtggaagatcctaagaaaaagcggaaagtggacggcagcggcagcgagacccccggtaccagcgagagcgccacccccgagagccggacactcggaaagaaaaccaagcggacagctgacagttcttcttcagaggatgaggaggagtatgttgtggagaaggtgctagacaggcgcgtggttaagggacaagtggaatatctactgaagtggaaaggcttttctgaggagcacaatacttgggaacctgagaaaaacttggattgccctgagctaatttctgaatttatgaaaaagtataagaagatgaaggagggtgaaaataataaacccagggagaagtcagaaagtaacaagaggaaatccaatttctcaaacagtgccgatgacatcaaatctaaaaaaaagagagagcagagcaatgatatcgctcggggctttgagagaggactggaaccagaaaagatcattggggcaacagattcctgtggtgatttaatgttcctaatgaaatggaaagacacagatgaagctgacctggttcttgcaaaagaagctaatgtgaaatgtccacaaattgtgatagcattttatgaagagagactgacatggcatgcatatcctgaggatgcggaaaacaaagagaaagaaacagcaaagagctga

SEQ ID NO: 259 - DNA, 7251 bp, synthetic construct
  misc_feature 1..7251: note = V74 CDS
  source 1..7251: mol_type = other DNA
atgcctgctgctaagagagtgaaactggatggatccaccggtccagccaccatgaaccatgaccaggaatttgaccccccaaaggtttacccacctgtgccagctgagaagaggaagcccatccgcgtgctgtctctctttgatgggattgctacagggctcctggtgctgaaggacctgggcatccaagtggaccgctacattgcctccgaggtgtgtgaggactccatcacggtgggcatggtgcggcaccagggaaagatcatgtacgtcggggacgtccgcagcgtcacacagaagcatatccaggagtggggcccattcgacctggtgattggaggcagtccctgcaatgacctctccattgtcaaccctgcccgcaagggactttatgagggtactggccgcctcttctttgagttctaccgcctcctgcatgatgcgcggcccaaggagggagatgatcgccccttcttctggctctttgagaatgtggtggccatgggcgttagtgacaagagggacatctcgcgatttcttgagtctaaccccgtgatgattgacgccaaagaagtgtctgctgcacacagggcccgttacttctggggtaaccttcctggcatgaacaggcctttggcatccactgtgaatgataagctggagctgcaagagtgtctggagcacggcagaatagccaagttcagcaaagtgaggaccattaccaccaggtcaaactctataaagcagggcaaagaccagcatttccccgtcttcatgaacgagaaggaggacatcctgtggtgcactgaaatggaaagggtgtttggcttccccgtccactacacagacgtctccaacatgagccgcttggcgaggcagagactgctgggccgatcgtggagcgtgccggtcatccgccacctcttcgctccgctgaaggaatattttgcttgtgtgtctagcggcaatagtaacgctaacagccgcgggccgagcttcagcagcggcctggtgccgttaagcttgcgcggcagccatatgggccctatggagatatacaagacagtgtctgcatggaagagacagccagtgcgggtactgagcctcttcagaaacatcgacaaggtactaaagagtttgggcttcttggaaagcggttctggttctgggggaggaacgctgaagtacgtggaagatgtcacaaatgtcgtgaggagagacgtggagaaatggggcccctttgacctggtgtacggctcgacgcagcccctaggcagctcttgtgatcgctgtcccggctggtacatgttccagttccaccggatcctgcagtatgcgctgcctcgccaggagagtcagcggcccttcttctggatattcatggacaatctgctgctgactgaggatgaccaagagacaactacccgcttccttcagacagaggctgtgaccctccaggatgtccgtggcagagactaccagaatgctatgcgggtgtggagcaacattccagggctgaagagcaagcatgcgcccctgaccccaaaggaagaagagtatctgcaagcccaagtcagaagcaggagcaagctggacgccccgaaagttgacctcctggtgaagaactgccttctcccgctgagagagtacttcaagtatttttctcaaaactcacttcctcttggagggccgagctctggcgcacccccaccaagtggagggtctcctgccgggtccccaacatctactgaagaaggcaccagcgaatccgcaacgcccgagtcaggccctggtacctccacagaaccatctgaaggtagtgcgcctggttccccagctggaagccctacttccaccgaagaaggcacgtcaaccgaaccaagtgaaggatctgcccctgggaccagcactgaaccatctgagccaaaaaagaagagaaaggtaatggacaagaagtacagcatcggcctggccatcggcaccaactctgtgggctgggccgtgatcaccgacgagtacaaggtgcccagcaagaaattcaaggtgctgggcaacaccgaccggcacagcatcaagaagaacctgatcggcgccctgctgttcgacagcggagaaacagccgaggccacccggctgaagagaaccgccagaagaagatacaccagacggaagaaccggatctgctatctgcaagagatcttcagcaacgagatggccaaggtggacgacagcttcttccacagactggaagagtccttcctggtggaagaggataagaagcacgagcggcaccccatcttcggcaacatcgtggacgaggtggcctaccacgagaagtaccccaccatctaccacctgagaaagaaactggtggacagcaccgacaaggccgacctgcggctgatctatctggccctggcccacatgatcaagttccggggccacttcctgatcgagggcgacctgaaccccgacaacagcgacgtggacaagctgttcatccagctggtgcagacctacaaccagctgttcgaggaaaaccccatcaacgccagcggcgtggacgccaaggccatcctgtctgccagactgagcaagagcagacggctggaaaatctgatcgcccagctgcccggcgagaagaagaatggcctgttcggcaacctgattgccctgagcctgggcctgacccccaacttcaagagcaacttcgacctggccgaggatgccaaactgcagctgagcaaggacacctacgacgacgacctggacaacctgctggcccagatcggcgaccagtacgccgacctgtttctggccgccaagaacctgtccgacgccatcctgctgagcgacatcctgagagtgaacaccgagatcaccaaggcccccctgagcgcctctatgatcaagagatacgacgagcaccaccaggacctgaccctgctgaaagctctcgtgcggcagcagctgcctgagaagtacaaagagattttcttcgaccagagcaagaacggctacgccggctacatcgatggcggagccagccaggaagagttctacaagttcatcaagcccatcctggaaaagatggacggcaccgaggaactgctcgtgaagctgaacagagaggacctgctgcggaagcagcggaccttcgacaacggcagcatcccccaccagatccacctgggagagctgcacgccattctgcggcggcaggaagatttttacccattcctgaaggacaaccgggaaaagatcgagaagatcctgaccttccgcatcccctactacgtgggccctctggccaggggaaacagcagattcgcctggatgaccagaaagagcgaggaaaccatcaccccctggaacttcgaggaagtggtggacaagggcgccagcgcccagagcttcatcgagcggatgaccaacttcgataagaacctgcccaacgagaaggtgctgcccaagcacagcctgctgtacgagtacttcaccgtgtacaacgagctgaccaaagtgaaatacgtgaccgagggaatgagaaagcccgccttcctgagcggcgagcagaaaaaagccatcgtggacctgctgttcaagaccaaccggaaagtgaccgtgaagcagctgaaagaggactacttcaagaaaatcgagtgcttcgactccgtggaaatctccggcgtggaagatcggttcaacgcctccctgggcacataccacgatctgctgaaaattatcaaggacaaggacttcctggacaatgaggaaaacgaggacattctggaagatatcgtgctgaccctgacactgtttgaggacagagagatgatcgaggaacggctgaaaacctatgcccacctgttcgacgacaaagtgatgaagcagctgaagcggcggagatacaccggctggggcaggctgagccggaagctgatcaacggcatccgggacaagcagtccggcaagacaatcctggatttcctgaagtccgacggcttcgccaacagaaacttcatgcagctgatccacgacgacagcctgacctttaaagaggacatccagaaagcccaggtgtccggccagggcgatagcctgcacgagcacattgccaatctggccggcagccccgccattaagaagggcatcctgcagacagtgaaggtggtggacgagctcgtgaaagtgatgggccggcacaagcccgagaacatcgtgatcgaaatggccagagagaaccagaccacccagaagggacagaagaacagccgcgagagaatgaagcggatcgaagagggcatcaaagagctgggcagccagatcctgaaagaacaccccgtggaaaacacccagctgcagaacgagaagctgtacctgtactacctgcagaatgggcgggatatgtacgtggaccaggaactggacatcaaccggctgtccgactacgatgtggacgctatcgtgcctcagagctttctgaaggacgactccatcgataacaaagtgctgactcggagcgacaagaaccggggcaagagcgacaacgtgccctccgaagaggtcgtgaagaagatgaagaactactggcgccagctgctgaatgccaagctgattacccagaggaagttcgacaatctgaccaaggccgagagaggcggcctgagcgaactggataaggccggcttcatcaagagacagctggtggaaacccggcagatcacaaagcacgtggcacagatcctggactcccggatgaacactaagtacgacgagaacgacaaactgatccgggaagtgaaagtgatcaccctgaagtccaagctggtgtccgatttccggaaggatttccagttttacaaagtgcgcgagatcaacaactaccaccacgcccacgacgcctacctgaacgccgtcgtgggaaccgccctgatcaaaaagtaccctaagctggaaagcgagttcgtgtacggcgactacaaggtgtacgacgtgcggaagatgatcgccaagagcgagcaggaaatcggcaaggctaccgccaagtacttcttctacagcaacatcatgaactttttcaagaccgagattaccctggccaacggcgagatccggaagcggcctctgatcgagacaaacggcgaaacaggcgagatcgtgtgggataagggccgggactttgccaccgtgcggaaagtgctgtctatgccccaagtgaatatcgtgaaaaagaccgaggtgcagacaggcggcttcagcaaagagtctatcctgcccaagaggaacagcgacaagctgatcgccagaaagaaggactgggaccctaagaagtacggcggcttcgacagccccaccgtggcctattctgtgctggtggtggccaaagtggaaaagggcaagtccaagaaactgaagagtgtgaaagagctgctggggatcaccatcatggaaagaagcagcttcgagaagaatcccatcgactttctggaagccaagggctacaaagaagtgaaaaaggacctgatcatcaagctgcctaagtactccctgttcgagctggaaaacggccggaagagaatgctggcctctgccggcgaactgcagaagggaaacgaactggccctgccctccaaatatgtgaacttcctgtacctggccagccactatgagaagctgaagggctcccccgaggataatgagcagaaacagctgtttgtggaacagcacaaacactacctggacgagatcatcgagcagatcagcgagttctccaagagagtgatcctggccgacgctaatctggacaaggtgctgagcgcctacaacaagcacagagacaagcctatcagagagcaggccgagaatatcatccacctgtttaccctgaccaatctgggagcccctgccgccttcaagtactttgacaccaccatcgaccggaagaggtacaccagcaccaaagaggtgctggacgccaccctgatccaccagagcatcaccggcctgtacgagacacggatcgacctgtctcagctgggaggcgacgcctatccctatgacgtgcccgattatgccagcctgggcagcggctcccccaagaaaaaacgcaaggtggaagatcctaagaaaaagcggaaagtggacggcagcggcagcgagacccccggtaccagcgagagcgccacccccgagagccggacactcgagcctccacctaatgcctatgaactctttgccaagggctatgaagactatctgcagtccccgcttcagccactgatggacaatctggaatctcagacatatgaagtgtttgaaaaggaccccatcaaatactctcagtaccagcaggccatctataaatgtctgctagaccgagtaccagaagaggagaaggataccaatgtccaggtactgatggtgctgggagcaggacggggacccctggtgaacgcttccctgcgggcagccaagcaggccgaccggcggataaagctgtatgctgtggagaaaaacccaaatgccgtggtgacgctagagaactggcagtttgaagaatggggaagccaagtgaccgtagtctcatcagacatgagggaatgggtggctccagagaaagcagacatcattgtcagtgagcttctgggctcatttgctgacaatgaattgtcgcctgagtgcctggatggagcccagcacttcctaaaagatgatggtgtgagcatccccggggagtacacttcctttctggctcccatctcttcctccaagctgtacaatgaggtccgagcctgtagggagaaggaccgtgaccctgaggcccagtttgagatgccttatgtggtacggctgcacaacttccaccagctctctgcaccccagccctgtttcaccttcagccatcccaacagagatcctatgattgacaacaaccgctattgcaccttggaatttcctgtggaggtgaacacagtactacatggctttgccggctactttgagactgtgctttatcaggacatcactctgagtatccgtccagagactcactctcctgggatgttctcatggtttcccatcctcttccctattaagcagcccataacggtacgtgaaggccaaaccatctgtgtgcgtttctggcgatgcagcaattccaagaaggtgtggtatgagtgggctgtgacagcaccagtctgttctgctattcataaccccacaggccgctcatataccattggcctctga

SEQ ID NO: 260 - DNA, 8796 bp, synthetic construct
  misc_feature 1..8796: note = V75 CDS
  source 1..8796: mol_type = other DNA
atgaaccatgaccaggaatttgaccccccaaaggtttacccacctgtgccagctgagaagaggaagcccatccgcgtgctgtctctctttgatgggattgctacagggctcctggtgctgaaggacctgggcatccaagtggaccgctacattgcctccgaggtgtgtgaggactccatcacggtgggcatggtgcggcaccagggaaagatcatgtacgtcggggacgtccgcagcgtcacacagaagcatatccaggagtggggcccattcgacctggtgattggaggcagtccctgcaatgacctctccattgtcaaccctgcccgcaagggactttatgagggtactggccgcctcttctttgagttctaccgcctcctgcatgatgcgcggcccaaggagggagatgatcgccccttcttctggctctttgagaatgtggtggccatgggcgttagtgacaagagggacatctcgcgatttcttgagtctaaccccgtgatgattgacgccaaagaagtgtctgctgcacacagggcccgttacttctggggtaaccttcctggcatgaacaggcctttggcatccactgtgaatgataagctggagctgcaagagtgtctggagcacggcagaatagccaagttcagcaaagtgaggaccattaccaccaggtcaaactctataaagcagggcaaagaccagcatttccccgtcttcatgaacgagaaggaggacatcctgtggtgcactgaaatggaaagggtgtttggcttccccgtccactacacagacgtctccaacatgagccgcttggcgaggcagagactgctgggccgatcgtggagcgtgccggtcatccgccacctcttcgctccgctgaaggaatattttgcttgtgtgtctagcggcaatagtaacgctaacagccgcgggccgagcttcagcagcggcctggtgccgttaagcttgcgcggcagccatatgggccctatggagatatacaagacagtgtctgcatggaagagacagccagtgcgggtactgagcctcttcagaaacatcgacaaggtactaaagagtttgggcttcttggaaagcggttctggttctgggggaggaacgctgaagtacgtggaagatgtcacaaatgtcgtgaggagagacgtggagaaatggggcccctttgacctggtgtacggctcgacgcagcccctaggcagctcttgtgatcgctgtcccggctggtacatgttccagttccaccggatcctgcagtatgcgctgcctcgccaggagagtcagcggcccttcttctggatattcatggacaatctgctgctgactgaggatgaccaagagacaactacccgcttccttcagacagaggctgtgaccctccaggatgtccgtggcagagactaccagaatgctatgcgggtgtggagcaacattccagggctgaagagcaagcatgcgcccctgaccccaaaggaagaagagtatctgcaagcccaagtcagaagcaggagcaagctggacgccccgaaagttgacctcctggtgaagaactgccttctcccgctgagagagtacttcaagtatttttctcaaaactcacttcctcttggagggccgagctctggcgcacccccaccaagtggagggtctcctgccgggtccccaacatctactgaagaaggcaccagcgaatccgcaacgcccgagtcaggccctggtacctccacagaaccatctgaaggtagtgcgcctggttccccagctggaagccctacttccaccgaagaaggcacgtcaaccgaaccaagtgaaggatctgcccctgggaccagcactgaaccatctgagccaaaaaagaagagaaaggtaatggacaagaagtacagcatcggcctggccatcggcaccaactctgtgggctgggccgtgatcaccgacgagtacaaggtgcccagcaagaaattcaaggtgctgggcaacaccgaccggcacagcatcaagaagaacctgatcggcgccctgctgttcgacagcggagaaacagccgaggccacccggctgaagagaaccgccagaagaagatacaccagacggaagaaccggatctgctatctgcaagagatcttcagcaacgagatggccaaggtggacgacagcttcttccacagactggaagagtccttcctggtggaagaggataagaagcacgagcggcaccccatcttcggcaacatcgtggacgaggtggcctaccacgagaagtaccccaccatctaccacctgagaaagaaactggtggacagcaccgacaaggccgacctgcggctgatctatctggccctggcccacatgatcaagttccggggccacttcctgatcgagggcgacctgaaccccgacaacagcgacgtggacaagctgttcatccagctggtgcagacctacaaccagctgttcgaggaaaaccccatcaacgccagcggcgtggacgccaaggccatcctgtctgccagactgagcaagagcagacggctggaaaatctgatcgcccagctgcccggcgagaagaagaatggcctgttcggcaacctgattgccctgagcctgggcctgacccccaacttcaagagcaacttcgacctggccgaggatgccaaactgcagctgagcaaggacacctacgacgacgacctggacaacctgctggcccagatcggcgaccagtacgccgacctgtttctggccgccaagaacctgtccgacgccatcctgctgagcgacatcctgagagtgaacaccgagatcaccaaggcccccctgagcgcctctatgatcaagagatacgacgagcaccaccaggacctgaccctgctgaaagctctcgtgcggcagcagctgcctgagaagtacaaagagattttcttcgaccagagcaagaacggctacgccggctacatcgatggcggagccagccaggaagagttctacaagttcatcaagcccatcctggaaaagatggacggcaccgaggaactgctcgtgaagctgaacagagaggacctgctgcggaagcagcggaccttcgacaacggcagcatcccccaccagatccacctgggagagctgcacgccattctgcggcggcaggaagatttttacccattcctgaaggacaaccgggaaaagatcgagaagatcctgaccttccgcatcccctactacgtgggccctctggccaggggaaacagcagattcgcctggatgaccagaaagagcgaggaaaccatcaccccctggaacttcgaggaagtggtggacaagggcgccagcgcccagagcttcatcgagcggatgaccaacttcgataagaacctgcccaacgagaaggtgctgcccaagcacagcctgctgtacgagtacttcaccgtgtacaacgagctgaccaaagtgaaatacgtgaccgagggaatgagaaagcccgccttcctgagcggcgagcagaaaaaagccatcgtggacctgctgttcaagaccaaccggaaagtgaccgtgaagcagctgaaagaggactacttcaagaaaatcgagtgcttcgactccgtggaaatctccggcgtggaagatcggttcaacgcctccctgggcacataccacgatctgctgaaaattatcaaggacaaggacttcctggacaatgaggaaaacgaggacattctggaagatatcgtgctgaccctgacactgtttgaggacagagagatgatcgaggaacggctgaaaacctatgcccacctgttcgacgacaaagtgatgaagcagctgaagcggcggagatacaccggctggggcaggctgagccggaagctgatcaacggcatccgggacaagcagtccggcaagacaatcctggatttcctgaagtccgacggcttcgccaacagaaacttcatgcagctgatccacgacgacagcctgacctttaaagaggacatccagaaagcccaggtgtccggccagggcgatagcctgcacgagcacattgccaatctggccggcagccccgccattaagaagggcatcctgcagacagtgaaggtggtggacgagctcgtgaaagtgatgggccggcacaagcccgagaacatcgtgatcgaaatggccagagagaaccagaccacccagaagggacagaagaacagccgcgagagaatgaagcggatcgaagagggcatcaaagagctgggcagccagatcctgaaagaacaccccgtggaaaacacccagctgcagaacgagaagctgtacctgtactacctgcagaatgggcgggatatgtacgtggaccaggaactggacatcaaccggctgtccgactacgatgtggacgctatcgtgcctcagagctttctgaaggacgactccatcgataacaaagtgctgactcggagcgacaagaaccggggcaagagcgacaacgtgccctccgaagaggtcgtgaagaagatgaagaactactggcgccagctgctgaatgccaagctgattacccagaggaagttcgacaatctgaccaaggccgagagaggcggcctgagcgaactggataaggccggcttcatcaagagacagctggtggaaacccggcagatcacaaagcacgtggcacagatcctggactcccggatgaacactaagtacgacgagaacgacaaactgatccgggaagtgaaagtgatcaccctgaagtccaagctggtgtccgatttccggaaggatttccagttttacaaagtgcgcgagatcaacaactaccaccacgcccacgacgcctacctgaacgccgtcgtgggaaccgccctgatcaaaaagtaccctaagctggaaagcgagttcgtgtacggcgactacaaggtgtacgacgtgcggaagatgatcgccaagagcgagcaggaaatcggcaaggctaccgccaagtacttcttctacagcaacatcatgaactttttcaagaccgagattaccctggccaacggcgagatccggaagcggcctctgatcgagacaaacggcgaaacaggcgagatcgtgtgggataagggccgggactttgccaccgtgcggaaagtgctgtctatgccccaagtgaatatcgtgaaaaagaccgaggtgcagacaggcggcttcagcaaagagtctatcctgcccaagaggaacagcgacaagctgatcgccagaaagaaggactgggaccctaagaagtacggcggcttcgacagccccaccgtggcctattctgtgctggtggtggccaaagtggaaaagggcaagtccaagaaactgaagagtgtgaaagagctgctggggatcaccatcatggaaagaagcagcttcgagaagaatcccatcgactttctggaagccaagggctacaaagaagtgaaaaaggacctgatcatcaagctgcctaagtactccctgttcgagctggaaaacggccggaagagaatgctggcctctgccggcgaactgcagaagggaaacgaactggccctgccctccaaatatgtgaacttcctgtacctggccagccactatgagaagctgaagggctcccccgaggataatgagcagaaacagctgtttgtggaacagcacaaacactacctggacgagatcatcgagcagatcagcgagttctccaagagagtgatcctggccgacgctaatctggacaaggtgctgagcgcctacaacaagcacagagacaagcctatcagagagcaggccgagaatatcatccacctgtttaccctgaccaatctgggagcccctgccgccttcaagtactttgacaccaccatcgaccggaagaggtacaccagcaccaaagaggtgctggacgccaccctgatccaccagagcatcaccggcctgtacgagacacggatcgacctgtctcagctgggaggcgacgcctatccctatgacgtgcccgattatgccagcctgggcagcggctcccccaagaaaaaacgcaaggtggaagatcctaagaaaaagcggaaagtggacggcagcggcagcgagacccccggtaccagcgagagcgccacccccgagagccggacactcttatctgggaagaaggcggcagccgcggcggcggcggctgcagcggcagcaaccgggacggaggctggccctgggacagcaggcggctccgagaacgggtctgaggtggccgcgcagcccgcgggcctgtcgggcccagccgaggtcgggccgggggcggtgggggagcgcacaccccgcaagaaagagcctccgcgggcctcgccccccgggggcctggcggaaccgccggggtccgcagggcctcaggccggccctactgtcgtgcctgggtctgcgacccccatggaaactggaatagcagagactccggaggggcgtcggaccagccggcgcaagcgggcgaaggtagagtacagagagatggatgaaagcttggccaacctctcagaagatgagtattattcagaagaagagagaaatgccaaagcagagaaggaaaagaagcttcccccaccaccccctcaagccccacctgaggaagaaaatgaaagtgagcctgaagaaccatcggggcaagcaggaggacttcaagacgacagttctggagggtatggagacggccaagcatcaggtgtggagggcgcagctttccagagccgacttcctcatgaccggatgacttctcaagaagcagcctgttttccagatattatcagtggaccacaacagacccagaaggtttttcttttcattagaaaccgcacactgcagttgtggttggataatccaaagattcagctgacatttgaggctactctccaacaattagaagcaccttataacagtgatactgtgcttgtccaccgagttcacagttatttagagcgtcatggtcttatcaacttcggcatctataagaggataaaacccctaccaactaaaaagacaggaaaggtaattattataggctctggggtctcaggcttggcagcagctcgacagttacaaagttttggaatggatgtcacacttttggaagccagggatcgtgtgggtggacgagttgccacatttcgcaaaggaaactatgtagctgatcttggagccatggtggtaacaggtcttggagggaatcctatggctgtggtcagcaaacaagtaaatatggaactggccaagatcaagcaaaaatgcccactttatgaagccaacggacaagctgacactgtcaaggttcctaaagagaaagatgaaatggtagagcaagagtttaaccggttgctagaagctacatcttaccttagtcatcaactagacttcaatgtcctcaataataagcctgtgtcccttggccaggcattggaagttgtcattcagttacaagagaagcatgtcaaagatgagcagattgaacattggaagaagatagtgaaaactcaggaagaattgaaagaacttcttaataagatggtaaatttgaaagagaaaattaaagaactccatcagcaatacaaagaagcatctgaagtaaagccacccagagatattactgccgagttcttagtgaaaagcaaacacagggatctgaccgccctatgcaaggaatatgatgaattagctgaaacacaaggaaagctagaagaaaaacttcaggagttggaagcgaatcccccaagtgatgtatatctctcatcaagagacagacaaatacttgattggcattttgcaaatcttgaatttgctaatgccacacctctctcaactctctcccttaagcactgggatcaggatgatgactttgagttcactggcagccacctgacagtaaggaatggctactcgtgtgtgcctgtggctttagcagaaggcctagacattaaactgaatacagcagtgcgacaggttcgctacacggcttcaggatgtgaagtgatagctgtgaatacccgctccacgagtcaaacctttatttataaatgcgacgcagttctctgtacccttcccctgggtgtgctgaagcagcagccaccagccgttcagtttgtgccacctctccctgagtggaaaacatctgcagtccaaaggatgggatttggcaaccttaacaaggtggtgttgtgttttgatcgggtgttctgggatccaagtgtcaatttgttcgggcatgttggcagtacgactgccagcaggggtgagctcttcctcttctggaacctctataaagctccaatactgttggcactagtggcaggagaagctgctggtatcatggaaaacataagtgacgatgtgattgttggccgatgcctggccattctcaaagggatttttggtagcagtgcagtacctcagcccaaagaaactgtggtgtctcgttggcgtgctgatccctgggctcggggctcttattcctatgttgctgcaggatcatctggaaatgactatgatttaatggctcagccaatcactcctggcccctcgattccaggtgccccacagccgattccacgactcttctttgcgggagaacatacgatccgtaactacccagccacagtgcatggtgctctgctgagtgggctgcgagaagcgggaagaattgcagaccagtttttgggggccatgtatacgctgcctcgccaggccacaccaggtgttcctgcacagcagtccccaagcatggagggcagcggctaa

SEQ ID NO: 261 - RNA, 6879 nt, synthetic construct
  misc_feature 1..6879: note = V7 mRNA
  source 1..6879: mol_type = other RNA
aggactcactatttgttttcgcgcccagttgcaaaaagtgtcgacatttgcttctgacacaactgtgttcactagcaacctcaaacagacaccttaattaatctagaaccggtccagccaccatgaaccatgaccaggaatttgaccccccaaaggtttacccacctgtgccagctgagaagaggaagcccatccgcgtgctgtctctctttgatgggattgctacagggctcctggtgctgaaggacctgggcatccaagtggaccgctacattgcctccgaggtgtgtgaggactccatcacggtgggcatggtgcggcaccagggaaagatcatgtacgtcggggacgtccgcagcgtcacacagaagcatatccaggagtggggcccattcgacctggtgattggaggcagtccctgcaatgacctctccattgtcaaccctgcccgcaagggactttatgagggtactggccgcctcttctttgagttctaccgcctcctgcatgatgcgcggcccaaggagggagatgatcgccccttcttctggctctttgagaatgtggtggccatgggcgttagtgacaagagggacatctcgcgatttcttgagtctaaccccgtgatgattgacgccaaagaagtgtctgctgcacacagggcccgttacttctggggtaaccttcctggcatgaacaggcctttggcatccactgtgaatgataagctggagctgcaagagtgtctggagcacggcagaatagccaagttcagcaaagtgaggaccattaccaccaggtcaaactctataaagcagggcaaagaccagcatttccccgtcttcatgaacgagaaggaggacatcctgtggtgcactgaaatggaaagggtgtttggcttccccgtccactacacagacgtctccaacatgagccgcttggcgaggcagagactgctgggccgatcgtggagcgtgccggtcatccgccacctcttcgctccgctgaaggaatattttgcttgtgtgtctagcggcaatagtaacgctaacagccgcgggccgagcttcagcagcggcctggtgccgttaagcttgcgcggcagccatatgggccctatggagatatacaagacagtgtctgcatggaagagacagccagtgcgggtactgagcctcttcagaaacatcgacaaggtactaaagagtttgggcttcttggaaagcggttctggttctgggggaggaacgctgaagtacgtggaagatgtcacaaatgtcgtgaggagagacgtggagaaatggggcccctttgacctggtgtacggctcgacgcagcccctaggcagctcttgtgatcgctgtcccggctggtacatgttccagttccaccggatcctgcagtatgcgctgcctcgccaggagagtcagcggcccttcttctggatattcatggacaatctgctgctgactgaggatgaccaagagacaactacccgcttccttcagacagaggctgtgaccctccaggatgtccgtggcagagactaccagaatgctatgcgggtgtggagcaacattccagggctgaagagcaagcatgcgcccctgaccccaaaggaagaagagtatctgcaagcccaagtcagaagcaggagcaagctggacgccccgaaagttgacctcctggtgaagaactgccttctcccgctgagagagtacttcaagtatttttctcaaaactcacttcctcttgacggcagcggcagcgagacccccggtaccagcgagagcgccacccccgagagcatgaacaattcccagggaagagtgaccttcgaggatgtcactgtgaacttcacccagggggagtggcagcggctgaatcccgaacagagaaacttgtacagggatgtgatgctggagaattacagcaaccttgtctctgtgggacaaggggaaaccaccaaacccgatgtgatcttgaggttggaacaaggaaaggagccatggttggaggaagaggaagtgctgggaagtggccgtgcagaaaaaaatggggacattggagggcagatttggaagccaaaggatgtgaaagagagtctcggagggccgagctctggcgcacccccaccaagtggagggtctcctgccgggtccccaacatctactgaagaaggcaccagcgaatccgcaacgcccgagtcaggccctggtacctccacagaaccatctgaaggtagtgcgcctggttccccagctggaagccctacttccaccgaagaaggcacgtcaaccgaaccaagtgaaggatctgcccctgggaccagcactgaaccatctgagccaaaaaagaagagaaaggtaatggacaagaagtacagcatcggcctggccatcggcaccaactctgtgggctgggccgtgatcaccgacgagtacaaggtgcccagcaagaaattcaaggtgctgggcaacaccgaccggcacagcatcaagaagaacctgatcggcgccctgctgttcgacagcggagaaacagccgaggccacccggctgaagagaaccgccagaagaagatacaccagacggaagaaccggatctgctatctgcaagagatcttcagcaacgagatggccaaggtggacgacagcttcttccacagactggaagagtccttcctggtggaagaggataagaagcacgagcggcaccccatcttcggcaacatcgtggacgaggtggcctaccacgagaagtaccccaccatctaccacctgagaaagaaactggtggacagcaccgacaaggccgacctgcggctgatctatctggccctggcccacatgatcaagttccggggccacttcctgatcgagggcgacctgaaccccgacaacagcgacgtggacaagctgttcatccagctggtgcagacctacaaccagctgttcgaggaaaaccccatcaacgccagcggcgtggacgccaaggccatcctgtctgccagactgagcaagagcagacggctggaaaatctgatcgcccagctgcccggcgagaagaagaatggcctgttcggcaacctgattgccctgagcctgggcctgacccccaacttcaagagcaacttcgacctggccgaggatgccaaactgcagctgagcaaggacacctacgacgacgacctggacaacctgctggcccagatcggcgaccagtacgccgacctgtttctggccgccaagaacctgtccgacgccatcctgctgagcgacatcctgagagtgaacaccgagatcaccaaggcccccctgagcgcctctatgatcaagagatacgacgagcaccaccaggacctgaccctgctgaaagctctcgtgcggcagcagctgcctgagaagtacaaagagattttcttcgaccagagcaagaacggctacgccggctacatcgatggcggagccagccaggaagagttctacaagttcatcaagcccatcctggaaaagatggacggcaccgaggaactgctcgtgaagctgaacagagaggacctgctgcggaagcagcggaccttcgacaacggcagcatcccccaccagatccacctgggagagctgcacgccattctgcggcggcaggaagatttttacccattcctgaaggacaaccgggaaaagatcgagaagatcctgaccttccgcatcccctactacgtgggccctctggccaggggaaacagcagattcgcctggatgaccagaaagagcgaggaaaccatcaccccctggaacttcgaggaagtggtggacaagggcgccagcgcccagagcttcatcgagcggatgaccaacttcgataagaacctgcccaacgagaaggtgctgcccaagcacagcctgctgtacgagtacttcaccgtgtacaacgagctgaccaaagtgaaatacgtgaccgagggaatgagaaagcccgccttcctgagcggcgagcagaaaaaagccatcgtggacctgctgttcaagaccaaccggaaagtgaccgtgaagcagctgaaagaggactacttcaagaaaatcgagtgcttcgactccgtggaaatctccggcgtggaagatcggttcaacgcctccctgggcacataccacgatctgctgaaaattatcaaggacaaggacttcctggacaatgaggaaaacgaggacattctggaagatatcgtgctgaccctgacactgtttgaggacagagagatgatcgaggaacggctgaaaacctatgcccacctgttcgacgacaaagtgatgaagcagctgaagcggcggagatacaccggctggggcaggctgagccggaagctgatcaacggcatccgggacaagcagtccggcaagacaatcctggatttcctgaagtccgacggcttcgccaacagaaacttcatgcagctgatccacgacgacagcctgacctttaaagaggacatccagaaagcccaggtgtccggccagggcgatagcctgcacgagcacattgccaatctggccggcagccccgccattaagaagggcatcctgcagacagtgaaggtggtggacgagctcgtgaaagtgatgggccggcacaagcccgagaacatcgtgatcgaaatggccagagagaaccagaccacccagaagggacagaagaacagccgcgagagaatgaagcggatcgaagagggcatcaaagagctgggcagccagatcctgaaagaacaccccgtggaaaacacccagctgcagaacgagaagctgtacctgtactacctgcagaatgggcgggatatgtacgtggaccaggaactggacatcaaccggctgtccgactacgatgtggacgctatcgtgcctcagagctttctgaaggacgactccatcgataacaaagtgctgactcggagcgacaagaaccggggcaagagcgacaacgtgccctccgaagaggtcgtgaagaagatgaagaactactggcgccagctgctgaatgccaagctgattacccagaggaagttcgacaatctgaccaaggccgagagaggcggcctgagcgaactggataaggccggcttcatcaagagacagctggtggaaacccggcagatcacaaagcacgtggcacagatcctggactcccggatgaacactaagtacgacgagaacgacaaactgatccgggaagtgaaagtgatcaccctgaagtccaagctggtgtccgatttccggaaggatttccagttttacaaagtgcgcgagatcaacaactaccaccacgcccacgacgcctacctgaacgccgtcgtgggaaccgccctgatcaaaaagtaccctaagctggaaagcgagttcgtgtacggcgactacaaggtgtacgacgtgcggaagatgatcgccaagagcgagcaggaaatcggcaaggctaccgccaagtacttcttctacagcaacatcatgaactttttcaagaccgagattaccctggccaacggcgagatccggaagcggcctctgatcgagacaaacggcgaaacaggcgagatcgtgtgggataagggccgggactttgccaccgtgcggaaagtgctgtctatgccccaagtgaatatcgtgaaaaagaccgaggtgcagacaggcggcttcagcaaagagtctatcctgcccaagaggaacagcgacaagctgatcgccagaaagaaggactgggaccctaagaagtacggcggcttcgacagccccaccgtggcctattctgtgctggtggtggccaaagtggaaaagggcaagtccaagaaactgaagagtgtgaaagagctgctggggatcaccatcatggaaagaagcagcttcgagaagaatcccatcgactttctggaagccaagggctacaaagaagtgaaaaaggacctgatcatcaagctgcctaagtactccctgttcgagctggaaaacggccggaagagaatgctggcctctgccggcgaactgcagaagggaaacgaactggccctgccctccaaatatgtgaacttcctgtacctggccagccactatgagaagctgaagggctcccccgaggataatgagcagaaacagctgtttgtggaacagcacaaacactacctggacgagatcatcgagcagatcagcgagttctccaagagagtgatcctggccgacgctaatctggacaaggtgctgagcgcctacaacaagcacagagacaagcctatcagagagcaggccgagaatatcatccacctgtttaccctgaccaatctgggagcccctgccgccttcaagtactttgacaccaccatcgaccggaagaggtacaccagcaccaaagaggtgctggacgccaccctgatccaccagagcatcaccggcctgtacgagacacggatcgacctgtctcagctgggaggcgacgcctatccctatgacgtgcccgattatgccagcctgggcagcggctcccccaagaaaaaacgcaaggtggaagatcctaagaaaaagcggaaagtggacggcctcgagtaatgagatcccaagcacgcagcaatgcagctcaaaacgcttagcctagccacacccccacgggaaacagcagtgattaacctttagcaataaacgaaagtttaactaagctatactaaccccagggttggtcaatttcgtgccagccacaccctggtactgcatgcacgcaatgctagctgcccctttcccgtcctgggcaccccgagtctcccccgaccccgggtcccaggtatgctcccacctccacctgccccactcaccacctctgctagttccagacacctccgagacgagg

SEQ ID NO: 262 - RNA, 6858 nt, synthetic construct
  misc_feature 1..6858: note = V8 mRNA
  source 1..6858: mol_type = other RNA
aggactcactatttgttttcgcgcccagttgcaaaaagtgtcgacatttgcttctgacacaactgtgttcactagcaacctcaaacagacaccttaattaagccaccatgaacaattcccagggaagagtgaccttcgaggatgtcactgtgaacttcacccagggggagtggcagcggctgaatcccgaacagagaaacttgtacagggatgtgatgctggagaattacagcaaccttgtctctgtgggacaaggggaaaccaccaaacccgatgtgatcttgaggttggaacaaggaaaggagccatggttggaggaagaggaagtgctgggaagtggccgtgcagaaaaaaatggggacattggagggcagatttggaagccaaaggatgtgaaagagagtctcagcggcagcgagacccccggtaccagcgagagcgccacccccgagagcatgaaccatgaccaggaatttgaccccccaaaggtttacccacctgtgccagctgagaagaggaagcccatccgcgtgctgtctctctttgatgggattgctacagggctcctggtgctgaaggacctgggcatccaagtggaccgctacattgcctccgaggtgtgtgaggactccatcacggtgggcatggtgcggcaccagggaaagatcatgtacgtcggggacgtccgcagcgtcacacagaagcatatccaggagtggggcccattcgacctggtgattggaggcagtccctgcaatgacctctccattgtcaaccctgcccgcaagggactttatgagggtactggccgcctcttctttgagttctaccgcctcctgcatgatgcgcggcccaaggagggagatgatcgccccttcttctggctctttgagaatgtggtggccatgggcgttagtgacaagagggacatctcgcgatttcttgagtctaaccccgtgatgattgacgccaaagaagtgtctgctgcacacagggcccgttacttctggggtaaccttcctggcatgaacaggcctttggcatccactgtgaatgataagctggagctgcaagagtgtctggagcacggcagaatagccaagttcagcaaagtgaggaccattaccaccaggtcaaactctataaagcagggcaaagaccagcatttccccgtcttcatgaacgagaaggaggacatcctgtggtgcactgaaatggaaagggtgtttggcttccccgtccactacacagacgtctccaacatgagccgcttggcgaggcagagactgctgggccgatcgtggagcgtgccggtcatccgccacctcttcgctccgctgaaggaatattttgcttgtgtgtctagcggcaatagtaacgctaacagccgcgggccgagcttcagcagcggcctggtgccgttaagcttgcgcggcagccatatgggccctatggagatatacaagacagtgtctgcatggaagagacagccagtgcgggtactgagcctcttcagaaacatcgacaaggtactaaagagtttgggcttcttggaaagcggttctggttctgggggaggaacgctgaagtacgtggaagatgtcacaaatgtcgtgaggagagacgtggagaaatggggcccctttgacctggtgtacggctcgacgcagcccctaggcagctcttgtgatcgctgtcccggctggtacatgttccagttccaccggatcctgcagtatgcgctgcctcgccaggagagtcagcggcccttcttctggatattcatggacaatctgctgctgactgaggatgaccaagagacaactacccgcttccttcagacagaggctgtgaccctccaggatgtccgtggcagagactaccagaatgctatgcgggtgtggagcaacattccagggctgaagagcaagcatgcgcccctgaccccaaaggaagaagagtatctgcaagcccaagtcagaagcaggagcaagctggacgccccgaaagttgacctcctggtgaagaactgccttctcccgctgagagagtacttcaagtatttttctcaaaactcacttcctcttggagggccgagctctggcgcacccccaccaagtggagggtctcctgccgggtccccaacatctactgaagaaggcaccagcgaatccgcaacgcccgagtcaggccctggtacctccacagaaccatctgaaggtagtgcgcctggttccccagctggaagccctacttccaccgaagaaggcacgtcaaccgaaccaagtgaaggatctgcccctgggaccagcactgaaccatctgagccaaaaaagaagagaaaggtaatggacaagaagtacagcatcggcctggccatcggcaccaactctgtgggctgggccgtgatcaccgacgagtacaaggtgcccagcaagaaattcaaggtgctgggcaacaccgaccggcacagcatcaagaagaacctgatcggcgccctgctgttcgacagcggagaaacagccgaggccacccggctgaagagaaccgccagaagaagatacaccagacggaagaaccggatctgctatctgcaagagatcttcagcaacgagatggccaaggtggacgacagcttcttccacagactggaagagtccttcctggtggaagaggataagaagcacgagcggcaccccatcttcggcaacatcgtggacgaggtggcctaccacgagaagtaccccaccatctaccacctgagaaagaaactggtggacagcaccgacaaggccgacctgcggctgatctatctggccctggcccacatgatcaagttccggggccacttcctgatcgagggcgacctgaaccccgacaacagcgacgtggacaagctgttcatccagctggtgcagacctacaaccagctgttcgaggaaaaccccatcaacgccagcggcgtggacgccaaggccatcctgtctgccagactgagcaagagcagacggctggaaaatctgatcgcccagctgcccggcgagaagaagaatggcctgttcggcaacctgattgccctgagcctgggcctgacccccaacttcaagagcaacttcgacctggccgaggatgccaaactgcagctgagcaaggacacctacgacgacgacctggacaacctgctggcccagatcggcgaccagtacgccgacctgtttctggccgccaagaacctgtccgacgccatcctgctgagcgacatcctgagagtgaacaccgagatcaccaaggcccccctgagcgcctctatgatcaagagatacgacgagcaccaccaggacctgaccctgctgaaagctctcgtgcggcagcagctgcctgagaagtacaaagagattttcttcgaccagagcaagaacggctacgccggctacatcgatggcggagccagccaggaagagttctacaagttcatcaagcccatcctggaaaagatggacggcaccgaggaactgctcgtgaagctgaacagagaggacctgctgcggaagcagcggaccttcgacaacggcagcatcccccaccagatccacctgggagagctgcacgccattctgcggcggcaggaagatttttacccattcctgaaggacaaccgggaaaagatcgagaagatcctgaccttccgcatcccctactacgtgggccctctggccaggggaaacagcagattcgcctggatgaccagaaagagcgaggaaaccatcaccccctggaacttcgaggaagtggtggacaagggcgccagcgcccagagcttcatcgagcggatgaccaacttcgataagaacctgcccaacgagaaggtgctgcccaagcacagcctgctgtacgagtacttcaccgtgtacaacgagctgaccaaagtgaaatacgtgaccgagggaatgagaaagcccgccttcctgagcggcgagcagaaaaaagccatcgtggacctgctgttcaagaccaaccggaaagtgaccgtgaagcagctgaaagaggactacttcaagaaaatcgagtgcttcgactccgtggaaatctccggcgtggaagatcggttcaacgcctccctgggcacataccacgatctgctgaaaattatcaaggacaaggacttcctggacaatgaggaaaacgaggacattctggaagatatcgtgctgaccctgacactgtttgaggacagagagatgatcgaggaacggctgaaaacctatgcccacctgttcgacgacaaagtgatgaagcagctgaagcggcggagatacaccggctggggcaggctgagccggaagctgatcaacggcatccgggacaagcagtccggcaagacaatcctggatttcctgaagtccgacggcttcgccaacagaaacttcatgcagctgatccacgacgacagcctgacctttaaagaggacatccagaaagcccaggtgtccggccagggcgatagcctgcacgagcacattgccaatctggccggcagccccgccattaagaagggcatcctgcagacagtgaaggtggtggacgagctcgtgaaagtgatgggccggcacaagcccgagaacatcgtgatcgaaatggccagagagaaccagaccacccagaagggacagaagaacagccgcgagagaatgaagcggatcgaagagggcatcaaagagctgggcagccagatcctgaaagaacaccccgtggaaaacacccagctgcagaacgagaagctgtacctgtactacctgcagaatgggcgggatatgtacgtggaccaggaactggacatcaaccggctgtccgactacgatgtggacgctatcgtgcctcagagctttctgaaggacgactccatcgataacaaagtgctgactcggagcgacaagaaccggggcaagagcgacaacgtgccctccgaagaggtcgtgaagaagatgaagaactactggcgccagctgctgaatgccaagctgattacccagaggaagttcgacaatctgaccaaggccgagagaggcggcctgagcgaactggataaggccggcttcatcaagagacagctggtggaaacccggcagatcacaaagcacgtggcacagatcctggactcccggatgaacactaagtacgacgagaacgacaaactgatccgggaagtgaaagtgatcaccctgaagtccaagctggtgtccgatttccggaaggatttccagttttacaaagtgcgcgagatcaacaactaccaccacgcccacgacgcctacctgaacgccgtcgtgggaaccgccctgatcaaaaagtaccctaagctggaaagcgagttcgtgtacggcgactacaaggtgtacgacgtgcggaagatgatcgccaagagcgagcaggaaatcggcaaggctaccgccaagtacttcttctacagcaacatcatgaactttttcaagaccgagattaccctggccaacggcgagatccggaagcggcctctgatcgagacaaacggcgaaacaggcgagatcgtgtgggataagggccgggactttgccaccgtgcggaaagtgctgtctatgccccaagtgaatatcgtgaaaaagaccgaggtgcagacaggcggcttcagcaaagagtctatcctgcccaagaggaacagcgacaagctgatcgccagaaagaaggactgggaccctaagaagtacggcggcttcgacagccccaccgtggcctattctgtgctggtggtggccaaagtggaaaagggcaagtccaagaaactgaagagtgtgaaagagctgctggggatcaccatcatggaaagaagcagcttcgagaagaatcccatcgactttctggaagccaagggctacaaagaagtgaaaaaggacctgatcatcaagctgcctaagtactccctgttcgagctggaaaacggccggaagagaatgctggcctctgccggcgaactgcagaagggaaacgaactggccctgccctccaaatatgtgaacttcctgtacctggccagccactatgagaagctgaagggctcccccgaggataatgagcagaaacagctgtttgtggaacagcacaaacactacctggacgagatcatcgagcagatcagcgagttctccaagagagtgatcctggccgacgctaatctggacaaggtgctgagcgcctacaacaagcacagagacaagcctatcagagagcaggccgagaatatcatccacctgtttaccctgaccaatctgggagcccctgccgccttcaagtactttgacaccaccatcgaccggaagaggtacaccagcaccaaagaggtgctggacgccaccctgatccaccagagcatcaccggcctgtacgagacacggatcgacctgtctcagctgggaggcgacgcctatccctatgacgtgcccgattatgccagcctgggcagcggctcccccaagaaaaaacgcaaggtggaagatcctaagaaaaagcggaaagtggacggcctcgagtaatgagatcccaagcacgcagcaatgcagctcaaaacgcttagcctagccacacccccacgggaaacagcagtgattaacctttagcaataaacgaaagtttaactaagctatactaaccccagggttggtcaatttcgtgccagccacaccctggtactgcatgcacgcaatgctagctgcccctttcccgtcctgggcaccccgagtctcccccgaccccgggtcccaggtatgctcccacctccacctgccccactcaccacctctgctagttccagacacctccgagacgagg

SEQ ID NO: 263 - RNA, 6874 nt, synthetic construct
  misc_feature 1..6874: note = V9 mRNA
  source 1..6874: mol_type = other RNA
aggactcactatttgttttcgcgcccagttgcaaaaagtgtcgacatttgcttctgacacaactgtgttcactagcaacctcaaacagacaccgccaccatggtccctgctgctaagagagtgaaactggatggatccgacaagaagtacagcatcggcctggccatcggcaccaactctgtgggctgggccgtgatcaccgacgagtacaaggtgcccagcaagaaattcaaggtgctgggcaacaccgaccggcacagcatcaagaagaacctgatcggcgccctgctgttcgacagcggagaaacagccgaggccacccggctgaagagaaccgccagaagaagatacaccagacggaagaaccggatctgctatctgcaagagatcttcagcaacgagatggccaaggtggacgacagcttcttccacagactggaagagtccttcctggtggaagaggataagaagcacgagcggcaccccatcttcggcaacatcgtggacgaggtggcctaccacgagaagtaccccaccatctaccacctgagaaagaaactggtggacagcaccgacaaggccgacctgcggctgatctatctggccctggcccacatgatcaagttccggggccacttcctgatcgagggcgacctgaaccccgacaacagcgacgtggacaagctgttcatccagctggtgcagacctacaaccagctgttcgaggaaaaccccatcaacgccagcggcgtggacgccaaggccatcctgtctgccagactgagcaagagcagacggctggaaaatctgatcgcccagctgcccggcgagaagaagaatggcctgttcggcaacctgattgccctgagcctgggcctgacccccaacttcaagagcaacttcgacctggccgaggatgccaaactgcagctgagcaaggacacctacgacgacgacctggacaacctgctggcccagatcggcgaccagtacgccgacctgtttctggccgccaagaacctgtccgacgccatcctgctgagcgacatcctgagagtgaacaccgagatcaccaaggcccccctgagcgcctctatgatcaagagatacgacgagcaccaccaggacctgaccctgctgaaagctctcgtgcggcagcagctgcctgagaagtacaaagagattttcttcgaccagagcaagaacggctacgccggctacatcgatggcggagccagccaggaagagttctacaagttcatcaagcccatcctggaaaagatggacggcaccgaggaactgctcgtgaagctgaacagagaggacctgctgcggaagcagcggaccttcgacaacggcagcatcccccaccagatccacctgggagagctgcacgccattctgcggcggcaggaagatttttacccattcctgaaggacaaccgggaaaagatcgagaagatcctgaccttccgcatcccctactacgtgggccctctggccaggggaaacagcagattcgcctggatgaccagaaagagcgaggaaaccatcaccccctggaacttcgaggaagtggtggacaagggcgccagcgcccagagcttcatcgagcggatgaccaacttcgataagaacctgcccaacgagaaggtgctgcccaagcacagcctgctgtacgagtacttcaccgtgtacaacgagctgaccaaagtgaaatacgtgaccgagggaatgagaaagcccgccttcctgagcggcgagcagaaaaaagccatcgtggacctgctgttcaagaccaaccggaaagtgaccgtgaagcagctgaaagaggactacttcaagaaaatcgagtgcttcgactccgtggaaatctccggcgtggaagatcggttcaacgcctccctgggcacataccacgatctgctgaaaattatcaaggacaaggacttcctggacaatgaggaaaacgaggacattctggaagatatcgtgctgaccctgacactgtttgaggacagagagatgatcgaggaacggctgaaaacctatgcccacctgttcgacgacaaagtgatgaagcagctgaagcggcggagatacaccggctggggcaggctgagccggaagctgatcaacggcatccgggacaagcagtccggcaagacaatcctggatttcctgaagtccgacggcttcgccaacagaaacttcatgcagctgatccacgacgacagcctgacctttaaagaggacatccagaaagcccaggtgtccggccagggcgatagcctgcacgagcacattgccaatctggccggcagccccgccattaagaagggcatcctgcagacagtgaaggtggtggacgagctcgtgaaagtgatgggccggcacaagcccgagaacatcgtgatcgaaatggccagagagaaccagaccacccagaagggacagaagaacagccgcgagagaatgaagcggatcgaagagggcatcaaagagctgggcagccagatcctgaaagaacaccccgtggaaaacacccagctgcagaacgagaagctgtacctgtactacctgcagaatgggcgggatatgtacgtggaccaggaactggacatcaaccggctgtccgactacgatgtggacgctatcgtgcctcagagctttctgaaggacgactccatcgataacaaagtgctgactcggagcgacaagaaccggggcaagagcgacaacgtgccctccgaagaggtcgtgaagaagatgaagaactactggcgccagctgctgaatgccaagctgattacccagaggaagttcgacaatctgaccaaggccgagagaggcggcctgagcgaactggataaggccggcttcatcaagagacagctggtggaaacccggcagatcacaaagcacgtggcacagatcctggactcccggatgaacactaagtacgacgagaacgacaaactgatccgggaagtgaaagtgatcaccctgaagtccaagctggtgtccgatttccggaaggatttccagttttacaaagtgcgcgagatcaacaactaccaccacgcccacgacgcctacctgaacgccgtcgtgggaaccgccctgatcaaaaagtaccctaagctggaaagcgagttcgtgtacggcgactacaaggtgtacgacgtgcggaagatgatcgccaagagcgagcaggaaatcggcaaggctaccgccaagtacttcttctacagcaacatcatgaactttttcaagaccgagattaccctggccaacggcgagatccggaagcggcctctgatcgagacaaacggcgaaacaggcgagatcgtgtgggataagggccgggactttgccaccgtgcggaaagtgctgtctatgccccaagtgaatatcgtgaaaaagaccgaggtgcagacaggcggcttcagcaaagagtctatcctgcccaagaggaacagcgacaagctgatcgccagaaagaaggactgggaccctaagaagtacggcggcttcgacagccccaccgtggcctattctgtgctggtggtggccaaagtggaaaagggcaagtccaagaaactgaagagtgtgaaagagctgctggggatcaccatcatggaaagaagcagcttcgagaagaatcccatcgactttctggaagccaagggctacaaagaagtgaaaaaggacctgatcatcaagctgcctaagtactccctgttcgagctggaaaacggccggaagagaatgctggcctctgccggcgaactgcagaagggaaacgaactggccctgccctccaaatatgtgaacttcctgtacctggccagccactatgagaagctgaagggctcccccgaggataatgagcagaaacagctgtttgtggaacagcacaaacactacctggacgagatcatcgagcagatcagcgagttctccaagagagtgatcctggccgacgctaatctggacaaggtgctgagcgcctacaacaagcacagagacaagcctatcagagagcaggccgagaatatcatccacctgtttaccctgaccaatctgggagcccctgccgccttcaagtactttgacaccaccatcgaccggaagaggtacaccagcaccaaagaggtgctggacgccaccctgatccaccagagcatcaccggcctgtacgagacacggatcgacctgtctcagctgggaggcgacgcctatccctatgacgtgcccgattatgccagcctgggcagcggctcccccaagaaaaaacgcaaggtggaagatcctaagaaaaagcggaaagtggacggcggagggccgagctctggcgcacccccaccaagtggagggtctcctgccgggtccccaacatctactgaagaaggcaccagcgaatccgcaacgcccgagtcaggccctggtacctccacagaaccatctgaaggtagtgcgcctggttccccagctggaagccctacttccaccgaagaaggcacgtcaaccgaaccaagtgaaggatctgcccctgggaccagcactgaaccatctgagatgaaccatgaccaggaatttgaccccccaaaggtttacccacctgtgccagctgagaagaggaagcccatccgcgtgctgtctctctttgatgggattgctacagggctcctggtgctgaaggacctgggcatccaagtggaccgctacattgcctccgaggtgtgtgaggactccatcacggtgggcatggtgcggcaccagggaaagatcatgtacgtcggggacgtccgcagcgtcacacagaagcatatccaggagtggggcccattcgacctggtgattggaggcagtccctgcaatgacctctccattgtcaaccctgcccgcaagggactttatgagggtactggccgcctcttctttgagttctaccgcctcctgcatgatgcgcggcccaaggagggagatgatcgccccttcttctggctctttgagaatgtggtggccatgggcgttagtgacaagagggacatctcgcgatttcttgagtctaaccccgtgatgattgacgccaaagaagtgtctgctgcacacagggcccgttacttctggggtaaccttcctggcatgaacaggcctttggcatccactgtgaatgataagctggagctgcaagagtgtctggagcacggcagaatagccaagttcagcaaagtgaggaccattaccaccaggtcaaactctataaagcagggcaaagaccagcatttccccgtcttcatgaacgagaaggaggacatcctgtggtgcactgaaatggaaagggtgtttggcttccccgtccactacacagacgtctccaacatgagccgcttggcgaggcagagactgctgggccgatcgtggagcgtgccggtcatccgccacctcttcgctccgctgaaggaatattttgcttgtgtgtctagcggcaatagtaacgctaacagccgcgggccgagcttcagcagcggcctggtgccgttaagcttgcgcggcagccatatgggccctatggagatatacaagacagtgtctgcatggaagagacagccagtgcgggtactgagcctcttcagaaacatcgacaaggtactaaagagtttgggcttcttggaaagcggttctggttctgggggaggaacgctgaagtacgtggaagatgtcacaaatgtcgtgaggagagacgtggagaaatggggcccctttgacctggtgtacggctcgacgcagcccctaggcagctcttgtgatcgctgtcccggctggtacatgttccagttccaccggatcctgcagtatgcgctgcctcgccaggagagtcagcggcccttcttctggatattcatggacaatctgctgctgactgaggatgaccaagagacaactacccgcttccttcagacagaggctgtgaccctccaggatgtccgtggcagagactaccagaatgctatgcgggtgtggagcaacattccagggctgaagagcaagcatgcgcccctgaccccaaaggaagaagagtatctgcaagcccaagtcagaagcaggagcaagctggacgccccgaaagttgacctcctggtgaagaactgccttctcccgctgagagagtacttcaagtatttttctcaaaactcacttcctcttgacggcagcggcagcgagacccccggtaccagcgagagcgccacccccgagagcatgaacaattcccagggaagagtgaccttcgaggatgtcactgtgaacttcacccagggggagtggcagcggctgaatcccgaacagagaaacttgtacagggatgtgatgctggagaattacagcaaccttgtctctgtgggacaaggggaaaccaccaaacccgatgtgatcttgaggttggaacaaggaaaggagccatggttggaggaagaggaagtgctgggaagtggccgtgcagaaaaaaatggggacattggagggcagatttggaagccaaaggatgtgaaagagagtctcctcgagtgataatagggatcccaagcacgcagcaatgcagctcaaaacgcttagcctagccacacccccacgggaaacagcagtgattaacctttagcaataaacgaaagtttaactaagctatactaaccccagggttggtcaatttcgtgccagccacaccctggtactgcatgcacgcaatgctagctgcccctttcccgtcctgggcaccccgagtctcccccgaccccgggtcccaggtatgctcccacctccacctgccccactcaccacctctgctagttccagacacctccgaagatgg

SEQ ID NO: 264 - RNA, 6970 nt, synthetic construct
  misc_feature 1..6970: note = V10 mRNA
  source 1..6970: mol_type = other RNA
aggactcactatttgttttcgcgcccagttgcaaaaagtgtcgacatttgcttctgacacaactgtgttcactagcaacctcaaacagacaccgccaccatgccaaaaaagaagagaaaggtaatggacaagaagtacagcatcggcctggccatcggcaccaactctgtgggctgggccgtgatcaccgacgagtacaaggtgcccagcaagaaattcaaggtgctgggcaacaccgaccggcacagcatcaagaagaacctgatcggcgccctgctgttcgacagcggagaaacagccgaggccacccggctgaagagaaccgccagaagaagatacaccagacggaagaaccggatctgctatctgcaagagatcttcagcaacgagatggccaaggtggacgacagcttcttccacagactggaagagtccttcctggtggaagaggataagaagcacgagcggcaccccatcttcggcaacatcgtggacgaggtggcctaccacgagaagtaccccaccatctaccacctgagaaagaaactggtggacagcaccgacaaggccgacctgcggctgatctatctggccctggcccacatgatcaagttccggggccacttcctgatcgagggcgacctgaaccccgacaacagcgacgtggacaagctgttcatccagctggtgcagacctacaaccagctgttcgaggaaaaccccatcaacgccagcggcgtggacgccaaggccatcctgtctgccagactgagcaagagcagacggctggaaaatctgatcgcccagctgcccggcgagaagaagaatggcctgttcggcaacctgattgccctgagcctgggcctgacccccaacttcaagagcaacttcgacctggccgaggatgccaaactgcagctgagcaaggacacctacgacgacgacctggacaacctgctggcccagatcggcgaccagtacgccgacctgtttctggccgccaagaacctgtccgacgccatcctgctgagcgacatcctgagagtgaacaccgagatcaccaaggcccccctgagcgcctctatgatcaagagatacgacgagcaccaccaggacctgaccctgctgaaagctctcgtgcggcagcagctgcctgagaagtacaaagagattttcttcgaccagagcaagaacggctacgccggctacatcgatggcggagccagccaggaagagttctacaagttcatcaagcccatcctggaaaagatggacggcaccgaggaactgctcgtgaagctgaacagagaggacctgctgcggaagcagcggaccttcgacaacggcagcatcccccaccagatccacctgggagagctgcacgccattctgcggcggcaggaagatttttacccattcctgaaggacaaccgggaaaagatcgagaagatcctgaccttccgcatcccctactacgtgggccctctggccaggggaaacagcagattcgcctggatgaccagaaagagcgaggaaaccatcaccccctggaacttcgaggaagtggtggacaagggcgccagcgcccagagcttcatcgagcggatgaccaacttcgataagaacctgcccaacgagaaggtgctgcccaagcacagcctgctgtacgagtacttcaccgtgtacaacgagctgaccaaagtgaaatacgtgaccgagggaatgagaaagcccgccttcctgagcggcgagcagaaaaaagccatcgtggacctgctgttcaagaccaaccggaaagtgaccgtgaagcagctgaaagaggactacttcaagaaaatcgagtgcttcgactccgtggaaatctccggcgtggaagatcggttcaacgcctccctgggcacataccacgatctgctgaaaattatcaaggacaaggacttcctggacaatgaggaaaacgaggacattctggaagatatcgtgctgaccctgacactgtttgaggacagagagatgatcgaggaacggctgaaaacctatgcccacctgttcgacgacaaagtgatgaagcagctgaagcggcggagatacaccggctggggcaggctgagccggaagctgatcaacggcatccgggacaagcagtccggcaagacaatcctggatttcctgaagtccgacggcttcgccaacagaaacttcatgcagctgatccacgacgacagcctgacctttaaagaggacatccagaaagcccaggtgtccggccagggcgatagcctgcacgagcacattgccaatctggccggcagccccgccattaagaagggcatcctgcagacagtgaaggtggtggacgagctcgtgaaagtgatgggccggcacaagcccgagaacatcgtgatcgaaatggccagagagaaccagaccacccagaagggacagaagaacagccgcgagagaatgaagcggatcgaagagggcatcaaagagctgggcagccagatcctgaaagaacaccccgtggaaaacacccagctgcagaacgagaagctgtacctgtactacctgcagaatgggcgggatatgtacgtggaccaggaactggacatcaaccggctgtccgactacgatgtggacgctatcgtgcctcagagctttctgaaggacgactccatcgataacaaagtgctgactcggagcgacaagaaccggggcaagagcgacaacgtgccctccgaagaggtcgtgaagaagatgaagaactactggcgccagctgctgaatgccaagctgattacccagaggaagttcgacaatctgaccaaggccgagagaggcggcctgagcgaactggataaggccggcttcatcaagagacagctggtggaaacccggcagatcacaaagcacgtggcacagatcctggactcccggatgaacactaagtacgacgagaacgacaaactgatccgggaagtgaaagtgatcaccctgaagtccaagctggtgtccgatttccggaaggatttccagttttacaaagtgcgcgagatcaacaactaccaccacgcccacgacgcctacctgaacgccgtcgtgggaaccgccctgatcaaaaagtaccctaagctggaaagcgagttcgtgtacggcgactacaaggtgtacgacgtgcggaagatgatcgccaagagcgagcaggaaatcggcaaggctaccgccaagtacttcttctacagcaacatcatgaactttttcaagaccgagattaccctggccaacggcgagatccggaagcggcctctgatcgagacaaacggcgaaacaggcgagatcgtgtgggataagggccgggactttgccaccgtgcggaaagtgctgtctatgccccaagtgaatatcgtgaaaaagaccgaggtgcagacaggcggcttcagcaaagagtctatcctgcccaagaggaacagcgacaagctgatcgccagaaagaaggactgggaccctaagaagtacggcggcttcgacagccccaccgtggcctattctgtgctggtggtggccaaagtggaaaagggcaagtccaagaaactgaagagtgtgaaagagctgctggggatcaccatcatggaaagaagcagcttcgagaagaatcccatcgactttctggaagccaagggctacaaagaagtgaaaaaggacctgatcatcaagctgcctaagtactccctgttcgagctggaaaacggccggaagagaatgctggcctctgccggcgaactgcagaagggaaacgaactggccctgccctccaaatatgtgaacttcctgtacctggccagccactatgagaagctgaagggctcccccgaggataatgagcagaaacagctgtttgtggaacagcacaaacactacctggacgagatcatcgagcagatcagcgagttctccaagagagtgatcctggccgacgctaatctggacaaggtgctgagcgcctacaacaagcacagagacaagcctatcagagagcaggccgagaatatcatccacctgtttaccctgaccaatctgggagcccctgccgccttcaagtactttgacaccaccatcgaccggaagaggtacaccagcaccaaagaggtgctggacgccaccctgatccaccagagcatcaccggcctgtacgagacacggatcgacctgtctcagctgggaggcgacgcctatccctatgacgtgcccgattatgccagcctgggcagcggctcccccaagaaaaaacgcaaggtggaagatcctaagaaaaagcggaaagtggacggcggagggccgagctctggcgcacccccaccaagtggagggtctcctgccgggtccccaacatctactgaagaaggcaccagcgaatccgcaacgcccgagtcaggccctggtacctccacagaaccatctgaaggtagtgcgcctggttccccagctggaagccctacttccaccgaagaaggcacgtcaaccgaaccaagtgaaggatctgcccctgggaccagcactgaaccatctgagatgaacaattcccagggaagagtgaccttcgaggatgtcactgtgaacttcacccagggggagtggcagcggctgaatcccgaacagagaaacttgtacagggatgtgatgctggagaattacagcaaccttgtctctgtgggacaaggggaaaccaccaaacccgatgtgatcttgaggttggaacaaggaaaggagccatggttggaggaagaggaagtgctgggaagtggccgtgcagaaaaaaatggggacattggagggcagatttggaagccaaaggatgtgaaagagagtctcagcggcagcgagacccccggtaccagcgagagcgccacccccgagagcatgaaccatgaccaggaatttgaccccccaaaggtttacccacctgtgccagctgagaagaggaagcccatccgcgtgctgtctctctttgatgggattgctacagggctcctggtgctgaaggacctgggcatccaagtggaccgctacattgcctccgaggtgtgtgaggactccatcacggtgggcatggtgcggcaccagggaaagatcatgtacgtcggggacgtccgcagcgtcacacagaagcatatccaggagtggggcccattcgacctggtgattggaggcagtccctgcaatgacctctccattgtcaaccctgcccgcaagggactttatgagggtactggccgcctcttctttgagttctaccgcctcctgcatgatgcgcggcccaaggagggagatgatcgccccttcttctggctctttgagaatgtggtggccatgggcgttagtgacaagagggacatctcgcgatttcttgagtctaaccccgtgatgattgacgccaaagaagtgtctgctgcacacagggcccgttacttctggggtaaccttcctggcatgaacaggcctttggcatccactgtgaatgataagctggagctgcaagagtgtctggagcacggcagaatagccaagttcagcaaagtgaggaccattaccaccaggtcaaactctataaagcagggcaaagaccagcatttccccgtcttcatgaacgagaaggaggacatcctgtggtgcactgaaatggaaagggtgtttggcttccccgtccactacacagacgtctccaacatgagccgcttggcgaggcagagactgctgggccgatcgtggagcgtgccggtcatccgccacctcttcgctccgctgaaggaatattttgcttgtgtgtctagcggcaatagtaacgctaacagccgcgggccgagcttcagcagcggcctggtgccgttaagcttgcgcggcagccatatgggccctatggagatatacaagacagtgtctgcatggaagagacagccagtgcgggtactgagcctcttcagaaacatcgacaaggtactaaagagtttgggcttcttggaaagcggttctggttctgggggaggaacgctgaagtacgtggaagatgtcacaaatgtcgtgaggagagacgtggagaaatggggcccctttgacctggtgtacggctcgacgcagcccctaggcagctcttgtgatcgctgtcccggctggtacatgttccagttccaccggatcctgcagtatgcgctgcctcgccaggagagtcagcggcccttcttctggatattcatggacaatctgctgctgactgaggatgaccaagagacaactacccgcttccttcagacagaggctgtgaccctccaggatgtccgtggcagagactaccagaatgctatgcgggtgtggagcaacattccagggctgaagagcaagcatgcgcccctgaccccaaaggaagaagagtatctgcaagcccaagtcagaagcaggagcaagctggacgccccgaaagttgacctcctggtgaagaactgccttctcccgctgagagagtacttcaagtatttttctcaaaactcacttcctcttctcgagtaagatcccaagcacgcagcaatgcagctcaaaacgcttagcctagccacacccccacgggaaacagcagtgattaacctttagcaataaacgaaagtttaactaagctatactaaccccagggttggtcaatttcgtgccagccacaccctggtactgcatgcacgcaatgctagctgcccctttcccgtcctgggcaccccgagtctcccccgaccccgggtcccaggtatgctcccacctccacctgccccactcaccacctctgctagttccagacacctccgagacgaggaaaaaaaaaaaaaaaaaaaaaaaaaaaaaaaaaaaaaaaaaaaaaaaaaaaaaaaaaaaaaaaaaaaaaaaaaaaaaaaaaaaaaaaaaaaaaaaaaaaaaaaaaaaaaaaaaaaaaaaa

SEQ ID NO: 265 - RNA, 6970 nt, synthetic construct
  misc_feature 1..6970: note = V11 mRNA
  source 1..6970: mol_type = other RNA
aggactcactatttgttttcgcgcccagttgcaaaaagtgtcgacatttgcttctgacacaactgtgttcactagcaacctcaaacagacaccgccaccatgccaaaaaagaagagaaaggtaatggacaagaagtacagcatcggcctggccatcggcaccaactctgtgggctgggccgtgatcaccgacgagtacaaggtgcccagcaagaaattcaaggtgctgggcaacaccgaccggcacagcatcaagaagaacctgatcggcgccctgctgttcgacagcggagaaacagccgaggccacccggctgaagagaaccgccagaagaagatacaccagacggaagaaccggatctgctatctgcaagagatcttcagcaacgagatggccaaggtggacgacagcttcttccacagactggaagagtccttcctggtggaagaggataagaagcacgagcggcaccccatcttcggcaacatcgtggacgaggtggcctaccacgagaagtaccccaccatctaccacctgagaaagaaactggtggacagcaccgacaaggccgacctgcggctgatctatctggccctggcccacatgatcaagttccggggccacttcctgatcgagggcgacctgaaccccgacaacagcgacgtggacaagctgttcatccagctggtgcagacctacaaccagctgttcgaggaaaaccccatcaacgccagcggcgtggacgccaaggccatcctgtctgccagactgagcaagagcagacggctggaaaatctgatcgcccagctgcccggcgagaagaagaatggcctgttcggcaacctgattgccctgagcctgggcctgacccccaacttcaagagcaacttcgacctggccgaggatgccaaactgcagctgagcaaggacacctacgacgacgacctggacaacctgctggcccagatcggcgaccagtacgccgacctgtttctggccgccaagaacctgtccgacgccatcctgctgagcgacatcctgagagtgaacaccgagatcaccaaggcccccctgagcgcctctatgatcaagagatacgacgagcaccaccaggacctgaccctgctgaaagctctcgtgcggcagcagctgcctgagaagtacaaagagattttcttcgaccagagcaagaacggctacgccggctacatcgatggcggagccagccaggaagagttctacaagttcatcaagcccatcctggaaaagatggacggcaccgaggaactgctcgtgaagctgaacagagaggacctgctgcggaagcagcggaccttcgacaacggcagcatcccccaccagatccacctgggagagctgcacgccattctgcggcggcaggaagatttttacccattcctgaaggacaaccgggaaaagatcgagaagatcctgaccttccgcatcccctactacgtgggccctctggccaggggaaacagcagattcgcctggatgaccagaaagagcgaggaaaccatcaccccctggaacttcgaggaagtggtggacaagggcgccagcgcccagagcttcatcgagcggatgaccaacttcgataagaacctgcccaacgagaaggtgctgcccaagcacagcctgctgtacgagtacttcaccgtgtacaacgagctgaccaaagtgaaatacgtgaccgagggaatgagaaagcccgccttcctgagcggcgagcagaaaaaagccatcgtggacctgctgttcaagaccaaccggaaagtgaccgtgaagcagctgaaagaggactacttcaagaaaatcgagtgcttcgactccgtggaaatctccggcgtggaagatcggttcaacgcctccctgggcacataccacgatctgctgaaaattatcaaggacaaggacttcctggacaatgaggaaaacgaggacattctggaagatatcgtgctgaccctgacactgtttgaggacagagagatgatcgaggaacggctgaaaacctatgcccacctgttcgacgacaaagtgatgaagcagctgaagcggcggagatacaccggctggggcaggctgagccggaagctgatcaacggcatccgggacaagcagtccggcaagacaatcctggatttcctgaagtccgacggcttcgccaacagaaacttcatgcagctgatccacgacgacagcctgacctttaaagaggacatccagaaagcccaggtgtccggccagggcgatagcctgcacgagcacattgccaatctggccggcagccccgccattaagaagggcatcctgcagacagtgaaggtggtggacgagctcgtgaaagtgatgggccggcacaagcccgagaacatcgtgatcgaaatggccagagagaaccagaccacccagaagggacagaagaacagccgcgagagaatgaagcggatcgaagagggcatcaaagagctgggcagccagatcctgaaagaacaccccgtggaaaacacccagctgcagaacgagaagctgtacctgtactacctgcagaatgggcgggatatgtacgtggaccaggaactggacatcaaccggctgtccgactacgatgtggacgctatcgtgcctcagagctttctgaaggacgactccatcgataacaaagtgctgactcggagcgacaagaaccggggcaagagcgacaacgtgccctccgaagaggtcgtgaagaagatgaagaactactggcgccagctgctgaatgccaagctgattacccagaggaagttcgacaatctgaccaaggccgagagaggcggcctgagcgaactggataaggccggcttcatcaagagacagctggtggaaacccggcagatcacaaagcacgtggcacagatcctggactcccggatgaacactaagtacgacgagaacgacaaactgatccgggaagtgaaagtgatcaccctgaagtccaagctggtgtccgatttccggaaggatttccagttttacaaagtgcgcgagatcaacaactaccaccacgcccacgacgcctacctgaacgccgtcgtgggaaccgccctgatcaaaaagtaccctaagctggaaagcgagttcgtgtacggcgactacaaggtgtacgacgtgcggaagatgatcgccaagagcgagcaggaaatcggcaaggctaccgccaagtacttcttctacagcaacatcatgaactttttcaagaccgagattaccctggccaacggcgagatccggaagcggcctctgatcgagacaaacggcgaaacaggcgagatcgtgtgggataagggccgggactttgccaccgtgcggaaagtgctgtctatgccccaagtgaatatcgtgaaaaagaccgaggtgcagacaggcggcttcagcaaagagtctatcctgcccaagaggaacagcgacaagctgatcgccagaaagaaggactgggaccctaagaagtacggcggcttcgacagccccaccgtggcctattctgtgctggtggtggccaaagtggaaaagggcaagtccaagaaactgaagagtgtgaaagagctgctggggatcaccatcatggaaagaagcagcttcgagaagaatcccatcgactttctggaagccaagggctacaaagaagtgaaaaaggacctgatcatcaagctgcctaagtactccctgttcgagctggaaaacggccggaagagaatgctggcctctgccggcgaactgcagaagggaaacgaactggccctgccctccaaatatgtgaacttcctgtacctggccagccactatgagaagctgaagggctcccccgaggataatgagcagaaacagctgtttgtggaacagcacaaacactacctggacgagatcatcgagcagatcagcgagttctccaagagagtgatcctggccgacgctaatctggacaaggtgctgagcgcctacaacaagcacagagacaagcctatcagagagcaggccgagaatatcatccacctgtttaccctgaccaatctgggagcccctgccgccttcaagtactttgacaccaccatcgaccggaagaggtacaccagcaccaaagaggtgctggacgccaccctgatccaccagagcatcaccggcctgtacgagacacggatcgacctgtctcagctgggaggcgacgcctatccctatgacgtgcccgattatgccagcctgggcagcggctcccccaagaaaaaacgcaaggtggaagatcctaagaaaaagcggaaagtggacggcggagggccgagctctggcgcacccccaccaagtggagggtctcctgccgggtccccaacatctactgaagaaggcaccagcgaatccgcaacgcccgagtcaggccctggtacctccacagaaccatctgaaggtagtgcgcctggttccccagctggaagccctacttccaccgaagaaggcacgtcaaccgaaccaagtgaaggatctgcccctgggaccagcactgaaccatctgagatgaacaattcccagggaagagtgaccttcgaggacgtgaccgtgaacttcacccaaggcgagtggcagagactgaaccccgagcagagaaacctgtaccgggacgtgatgctggaaaactacagcaacctggtgtccgtcggccagggcgagacaacaaagcctgacgtgatcctgcggctggaacagggcaaagagccttggctggaagaggaagaggtgctcggatctggcagagccgagaagaatggcgatatcggcggacagatctggaagccaaaggatgtgaaagagagtctcagcggcagcgagacccccggtaccagcgagagcgccacccccgagagcatgggccctatggagatatacaagacagtgtctgcatggaagagacagccagtgcgggtactgagcctcttcagaaacatcgacaaggtactaaagagtttgggcttcttggaaagcggttctggttctgggggaggaacgctgaagtacgtggaagatgtcacaaatgtcgtgaggagagacgtggagaaatggggcccctttgacctggtgtacggctcgacgcagcccctaggcagctcttgtgatcgctgtcccggctggtacatgttccagttccaccggatcctgcagtatgcgctgcctcgccaggagagtcagcggcccttcttctggatattcatggacaatctgctgctgactgaggatgaccaagagacaactacccgcttccttcagacagaggctgtgaccctccaggatgtccgtggcagagactaccagaatgctatgcgggtgtggagcaacattccagggctgaagagcaagcatgcgcccctgaccccaaaggaagaagagtatctgcaagcccaagtcagaagcaggagcaagctggacgccccgaaagttgacctcctggtgaagaactgccttctcccgctgagagagtacttcaagtatttttctcaaaactcacttcctctttctagcggcaatagtaacgctaacagccgcgggccgagcttcagcagcggcctggtgccgttaagcttgcgcggcagccatatgaaccatgaccaggaatttgaccccccaaaggtttacccacctgtgccagctgagaagaggaagcccatccgcgtgctgtctctctttgatgggattgctacagggctcctggtgctgaaggacctgggcatccaagtggaccgctacattgcctccgaggtgtgtgaggactccatcacggtgggcatggtgcggcaccagggaaagatcatgtacgtcggggacgtccgcagcgtcacacagaagcatatccaggagtggggcccattcgacctggtgattggaggcagtccctgcaatgacctctccattgtcaaccctgcccgcaagggactttatgagggtactggccgcctcttctttgagttctaccgcctcctgcatgatgcgcggcccaaggagggagatgatcgccccttcttctggctctttgagaatgtggtggccatgggcgttagtgacaagagggacatctcgcgatttcttgagtctaaccccgtgatgattgacgccaaagaagtgtctgctgcacacagggcccgttacttctggggtaaccttcctggcatgaacaggcctttggcatccactgtgaatgataagctggagctgcaagagtgtctggagcacggcagaatagccaagttcagcaaagtgaggaccattaccaccaggtcaaactctataaagcagggcaaagaccagcatttccccgtcttcatgaacgagaaggaggacatcctgtggtgcactgaaatggaaagggtgtttggcttccccgtccactacacagacgtctccaacatgagccgcttggcgaggcagagactgctgggccgatcgtggagcgtgccggtcatccgccacctcttcgctccgctgaaggaatattttgcttgtgtgctcgagtaagatcccaagcacgcagcaatgcagctcaaaacgcttagcctagccacacccccacgggaaacagcagtgattaacctttagcaataaacgaaagtttaactaagctatactaaccccagggttggtcaatttcgtgccagccacaccctggtactgcatgcacgcaatgctagctgcccctttcccgtcctgggcaccccgagtctcccccgaccccgggtcccaggtatgctcccacctccacctgccccactcaccacctctgctagttccagacacctccgagacgaggaaaaaaaaaaaaaaaaaaaaaaaaaaaaaaaaaaaaaaaaaaaaaaaaaaaaaaaaaaaaaaaaaaaaaaaaaaaaaaaaaaaaaaaaaaaaaaaaaaaaaaaaaaaaaaaaaaaaaaaa

SEQ ID NO: 266 - RNA, 7102 nt, synthetic construct
  misc_feature 1..7102: note = V14 mRNA
  source 1..7102: mol_type = other RNA
aggactcactatttgttttcgcgcccagttgcaaaaagtgtcgacatttgcttctgacacaactgtgttcactagcaacctcaaacagacaccgccaccatgccaaaaaagaagagaaaggtaatggacaagaagtacagcatcggcctggccatcggcaccaactctgtgggctgggccgtgatcaccgacgagtacaaggtgcccagcaagaaattcaaggtgctgggcaacaccgaccggcacagcatcaagaagaacctgatcggcgccctgctgttcgacagcggagaaacagccgaggccacccggctgaagagaaccgccagaagaagatacaccagacggaagaaccggatctgctatctgcaagagatcttcagcaacgagatggccaaggtggacgacagcttcttccacagactggaagagtccttcctggtggaagaggataagaagcacgagcggcaccccatcttcggcaacatcgtggacgaggtggcctaccacgagaagtaccccaccatctaccacctgagaaagaaactggtggacagcaccgacaaggccgacctgcggctgatctatctggccctggcccacatgatcaagttccggggccacttcctgatcgagggcgacctgaaccccgacaacagcgacgtggacaagctgttcatccagctggtgcagacctacaaccagctgttcgaggaaaaccccatcaacgccagcggcgtggacgccaaggccatcctgtctgccagactgagcaagagcagacggctggaaaatctgatcgcccagctgcccggcgagaagaagaatggcctgttcggcaacctgattgccctgagcctgggcctgacccccaacttcaagagcaacttcgacctggccgaggatgccaaactgcagctgagcaaggacacctacgacgacgacctggacaacctgctggcccagatcggcgaccagtacgccgacctgtttctggccgccaagaacctgtccgacgccatcctgctgagcgacatcctgagagtgaacaccgagatcaccaaggcccccctgagcgcctctatgatcaagagatacgacgagcaccaccaggacctgaccctgctgaaagctctcgtgcggcagcagctgcctgagaagtacaaagagattttcttcgaccagagcaagaacggctacgccggctacatcgatggcggagccagccaggaagagttctacaagttcatcaagcccatcctggaaaagatggacggcaccgaggaactgctcgtgaagctgaacagagaggacctgctgcggaagcagcggaccttcgacaacggcagcatcccccaccagatccacctgggagagctgcacgccattctgcggcggcaggaagatttttacccattcctgaaggacaaccgggaaaagatcgagaagatcctgaccttccgcatcccctactacgtgggccctctggccaggggaaacagcagattcgcctggatgaccagaaagagcgaggaaaccatcaccccctggaacttcgaggaagtggtggacaagggcgccagcgcccagagcttcatcgagcggatgaccaacttcgataagaacctgcccaacgagaaggtgctgcccaagcacagcctgctgtacgagtacttcaccgtgtacaacgagctgaccaaagtgaaatacgtgaccgagggaatgagaaagcccgccttcctgagcggcgagcagaaaaaagccatcgtggacctgctgttcaagaccaaccggaaagtgaccgtgaagcagctgaaagaggactacttcaagaaaatcgagtgcttcgactccgtggaaatctccggcgtggaagatcggttcaacgcctccctgggcacataccacgatctgctgaaaattatcaaggacaaggacttcctggacaatgaggaaaacgaggacattctggaagatatcgtgctgaccctgacactgtttgaggacagagagatgatcgaggaacggctgaaaacctatgcccacctgttcgacgacaaagtgatgaagcagctgaagcggcggagatacaccggctggggcaggctgagccggaagctgatcaacggcatccgggacaagcagtccggcaagacaatcctggatttcctgaagtccgacggcttcgccaacagaaacttcatgcagctgatccacgacgacagcctgacctttaaagaggacatccagaaagcccaggtgtccggccagggcgatagcctgcacgagcacattgccaatctggccggcagccccgccattaagaagggcatcctgcagacagtgaaggtggtggacgagctcgtgaaagtgatgggccggcacaagcccgagaacatcgtgatcgaaatggccagagagaaccagaccacccagaagggacagaagaacagccgcgagagaatgaagcggatcgaagagggcatcaaagagctgggcagccagatcctgaaagaacaccccgtggaaaacacccagctgcagaacgagaagctgtacctgtactacctgcagaatgggcgggatatgtacgtggaccaggaactggacatcaaccggctgtccgactacgatgtggacgctatcgtgcctcagagctttctgaaggacgactccatcgataacaaagtgctgactcggagcgacaagaaccggggcaagagcgacaacgtgccctccgaagaggtcgtgaagaagatgaagaactactggcgccagctgctgaatgccaagctgattacccagaggaagttcgacaatctgaccaaggccgagagaggcggcctgagcgaactggataaggccggcttcatcaagagacagctggtggaaacccggcagatcacaaagcacgtggcacagatcctggactcccggatgaacactaagtacgacgagaacgacaaactgatccgggaagtgaaagtgatcaccctgaagtccaagctggtgtccgatttccggaaggatttccagttttacaaagtgcgcgagatcaacaactaccaccacgcccacgacgcctacctgaacgccgtcgtgggaaccgccctgatcaaaaagtaccctaagctggaaagcgagttcgtgtacggcgactacaaggtgtacgacgtgcggaagatgatcgccaagagcgagcaggaaatcggcaaggctaccgccaagtacttcttctacagcaacatcatgaactttttcaagaccgagattaccctggccaacggcgagatccggaagcggcctctgatcgagacaaacggcgaaacaggcgagatcgtgtgggataagggccgggactttgccaccgtgcggaaagtgctgtctatgccccaagtgaatatcgtgaaaaagaccgaggtgcagacaggcggcttcagcaaagagtctatcctgcccaagaggaacagcgacaagctgatcgccagaaagaaggactgggaccctaagaagtacggcggcttcgacagccccaccgtggcctattctgtgctggtggtggccaaagtggaaaagggcaagtccaagaaactgaagagtgtgaaagagctgctggggatcaccatcatggaaagaagcagcttcgagaagaatcccatcgactttctggaagccaagggctacaaagaagtgaaaaaggacctgatcatcaagctgcctaagtactccctgttcgagctggaaaacggccggaagagaatgctggcctctgccggcgaactgcagaagggaaacgaactggccctgccctccaaatatgtgaacttcctgtacctggccagccactatgagaagctgaagggctcccccgaggataatgagcagaaacagctgtttgtggaacagcacaaacactacctggacgagatcatcgagcagatcagcgagttctccaagagagtgatcctggccgacgctaatctggacaaggtgctgagcgcctacaacaagcacagagacaagcctatcagagagcaggccgagaatatcatccacctgtttaccctgaccaatctgggagcccctgccgccttcaagtactttgacaccaccatcgaccggaagaggtacaccagcaccaaagaggtgctggacgccaccctgatccaccagagcatcaccggcctgtacgagacacggatcgacctgtctcagctgggaggcgacgcctatccctatgacgtgcccgattatgccagcctgggcagcggctcccccaagaaaaaacgcaaggtggaagatcctaagaaaaagcggaaagtggacggcggagggccgagctctggcgcacccccaccaagtggagggtctcctgccgggtccccaacatctactgaagaaggcaccagcgaatccgcaacgcccgagtcaggccctggtacctccacagaaccatctgaaggtagtgcgcctggttccccagctggaagccctacttccaccgaagaaggcacgtcaaccgaaccaagtgaaggatctgcccctgggaccagcactgaaccatctgagatgaacaattcccagggaagagtgaccttcgaggatgtcactgtgaacttcacccagggggagtggcagcggctgaatcccgaacagagaaacttgtacagggatgtgatgctggagaattacagcaaccttgtctctgtgggacaaggggaaaccaccaaacccgatgtgatcttgaggttggaacaaggaaaggagccatggttggaggaagaggaagtgctgggaagtggccgtgcagaaaaaaatggggacattggagggcagatttggaagccaaaggatgtgaaagagagtctcagcggcagcgagacccccggtaccagcgagggcggccctagcagcggcgcccctccccctagcggcggcagccctgccggatcccctacaagcaccgaggagggcacaagcaccgagccttccgagggcagcgcccccggaacaagcaccgaacctagcgagagcgccacccccgagagcatgggccctatggagatatacaagacagtgtctgcatggaagagacagccagtgcgggtactgagcctcttcagaaacatcgacaaggtactaaagagtttgggcttcttggaaagcggttctggttctgggggaggaacgctgaagtacgtggaagatgtcacaaatgtcgtgaggagagacgtggagaaatggggcccctttgacctggtgtacggctcgacgcagcccctaggcagctcttgtgatcgctgtcccggctggtacatgttccagttccaccggatcctgcagtatgcgctgcctcgccaggagagtcagcggcccttcttctggatattcatggacaatctgctgctgactgaggatgaccaagagacaactacccgcttccttcagacagaggctgtgaccctccaggatgtccgtggcagagactaccagaatgctatgcgggtgtggagcaacattccagggctgaagagcaagcatgcgcccctgaccccaaaggaagaagagtatctgcaagcccaagtcagaagcaggagcaagctggacgccccgaaagttgacctcctggtgaagaactgccttctcccgctgagagagtacttcaagtatttttctcaaaactcacttcctctttctagcggcaatagtaacgctaacagccgcgggccgagcttcagcagcggcctggtgccgttaagcttgcgcggcagccatatgaaccatgaccaggaatttgaccccccaaaggtttacccacctgtgccagctgagaagaggaagcccatccgcgtgctgtctctctttgatgggattgctacagggctcctggtgctgaaggacctgggcatccaagtggaccgctacattgcctccgaggtgtgtgaggactccatcacggtgggcatggtgcggcaccagggaaagatcatgtacgtcggggacgtccgcagcgtcacacagaagcatatccaggagtggggcccattcgacctggtgattggaggcagtccctgcaatgacctctccattgtcaaccctgcccgcaagggactttatgagggtactggccgcctcttctttgagttctaccgcctcctgcatgatgcgcggcccaaggagggagatgatcgccccttcttctggctctttgagaatgtggtggccatgggcgttagtgacaagagggacatctcgcgatttcttgagtctaaccccgtgatgattgacgccaaagaagtgtctgctgcacacagggcccgttacttctggggtaaccttcctggcatgaacaggcctttggcatccactgtgaatgataagctggagctgcaagagtgtctggagcacggcagaatagccaagttcagcaaagtgaggaccattaccaccaggtcaaactctataaagcagggcaaagaccagcatttccccgtcttcatgaacgagaaggaggacatcctgtggtgcactgaaatggaaagggtgtttggcttccccgtccactacacagacgtctccaacatgagccgcttggcgaggcagagactgctgggccgatcgtggagcgtgccggtcatccgccacctcttcgctccgctgaaggaatattttgcttgtgtgctcgagtaagatcccaagcacgcagcaatgcagctcaaaacgcttagcctagccacacccccacgggaaacagcagtgattaacctttagcaataaacgaaagtttaactaagctatactaaccccagggttggtcaatttcgtgccagccacaccctggtactgcatgcacgcaatgctagctgcccctttcccgtcctgggcaccccgagtctcccccgaccccgggtcccaggtatgctcccacctccacctgccccactcaccacctctgctagttccagacacctccgagacgaggaaaaaaaaaaaaaaaaaaaaaaaaaaaaaaaaaaaaaaaaaaaaaaaaaaaaaaaaaaaaaaaaaaaaaaaaaaaaaaaaaaaaaaaaaaaaaaaaaaaaaaaaaaaaaaaaaaaaaaaa

SEQ ID NO: 267 - RNA, 7090 nt, synthetic construct
  misc_feature 1..7090: note = V15 mRNA
  source 1..7090: mol_type = other RNA
aggactcactatttgttttcgcgcccagttgcaaaaagtgtcgacatttgcttctgacacaactgtgttcactagcaacctcaaacagacaccgccaccatggtccctgctgctaagagagtgaaactggatggatccgacaagaagtacagcatcggcctggccatcggcaccaactctgtgggctgggccgtgatcaccgacgagtacaaggtgcccagcaagaaattcaaggtgctgggcaacaccgaccggcacagcatcaagaagaacctgatcggcgccctgctgttcgacagcggagaaacagccgaggccacccggctgaagagaaccgccagaagaagatacaccagacggaagaaccggatctgctatctgcaagagatcttcagcaacgagatggccaaggtggacgacagcttcttccacagactggaagagtccttcctggtggaagaggataagaagcacgagcggcaccccatcttcggcaacatcgtggacgaggtggcctaccacgagaagtaccccaccatctaccacctgagaaagaaactggtggacagcaccgacaaggccgacctgcggctgatctatctggccctggcccacatgatcaagttccggggccacttcctgatcgagggcgacctgaaccccgacaacagcgacgtggacaagctgttcatccagctggtgcagacctacaaccagctgttcgaggaaaaccccatcaacgccagcggcgtggacgccaaggccatcctgtctgccagactgagcaagagcagacggctggaaaatctgatcgcccagctgcccggcgagaagaagaatggcctgttcggcaacctgattgccctgagcctgggcctgacccccaacttcaagagcaacttcgacctggccgaggatgccaaactgcagctgagcaaggacacctacgacgacgacctggacaacctgctggcccagatcggcgaccagtacgccgacctgtttctggccgccaagaacctgtccgacgccatcctgctgagcgacatcctgagagtgaacaccgagatcaccaaggcccccctgagcgcctctatgatcaagagatacgacgagcaccaccaggacctgaccctgctgaaagctctcgtgcggcagcagctgcctgagaagtacaaagagattttcttcgaccagagcaagaacggctacgccggctacatcgatggcggagccagccaggaagagttctacaagttcatcaagcccatcctggaaaagatggacggcaccgaggaactgctcgtgaagctgaacagagaggacctgctgcggaagcagcggaccttcgacaacggcagcatcccccaccagatccacctgggagagctgcacgccattctgcggcggcaggaagatttttacccattcctgaaggacaaccgggaaaagatcgagaagatcctgaccttccgcatcccctactacgtgggccctctggccaggggaaacagcagattcgcctggatgaccagaaagagcgaggaaaccatcaccccctggaacttcgaggaagtggtggacaagggcgccagcgcccagagcttcatcgagcggatgaccaacttcgataagaacctgcccaacgagaaggtgctgcccaagcacagcctgctgtacgagtacttcaccgtgtacaacgagctgaccaaagtgaaatacgtgaccgagggaatgagaaagcccgccttcctgagcggcgagcagaaaaaagccatcgtggacctgctgttcaagaccaaccggaaagtgaccgtgaagcagctgaaagaggactacttcaagaaaatcgagtgcttcgactccgtggaaatctccggcgtggaagatcggttcaacgcctccctgggcacataccacgatctgctgaaaattatcaaggacaaggacttcctggacaatgaggaaaacgaggacattctggaagatatcgtgctgaccctgacactgtttgaggacagagagatgatcgaggaacggctgaaaacctatgcccacctgttcgacgacaaagtgatgaagcagctgaagcggcggagatacaccggctggggcaggctgagccggaagctgatcaacggcatccgggacaagcagtccggcaagacaatcctggatttcctgaagtccgacggcttcgccaacagaaacttcatgcagctgatccacgacgacagcctgacctttaaagaggacatccagaaagcccaggtgtccggccagggcgatagcctgcacgagcacattgccaatctggccggcagccccgccattaagaagggcatcctgcagacagtgaaggtggtggacgagctcgtgaaagtgatgggccggcacaagcccgagaacatcgtgatcgaaatggccagagagaaccagaccacccagaagggacagaagaacagccgcgagagaatgaagcggatcgaagagggcatcaaagagctgggcagccagatcctgaaagaacaccccgtggaaaacacccagctgcagaacgagaagctgtacctgtactacctgcagaatgggcgggatatgtacgtggaccaggaactggacatcaaccggctgtccgactacgatgtggacgctatcgtgcctcagagctttctgaaggacgactccatcgataacaaagtgctgactcggagcgacaagaaccggggcaagagcgacaacgtgccctccgaagaggtcgtgaagaagatgaagaactactggcgccagctgctgaatgccaagctgattacccagaggaagttcgacaatctgaccaaggccgagagaggcggcctgagcgaactggataaggccggcttcatcaagagacagctggtggaaacccggcagatcacaaagcacgtggcacagatcctggactcccggatgaacactaagtacgacgagaacgacaaactgatccgggaagtgaaagtgatcaccctgaagtccaagctggtgtccgatttccggaaggatttccagttttacaaagtgcgcgagatcaacaactaccaccacgcccacgacgcctacctgaacgccgtcgtgggaaccgccctgatcaaaaagtaccctaagctggaaagcgagttcgtgtacggcgactacaaggtgtacgacgtgcggaagatgatcgccaagagcgagcaggaaatcggcaaggctaccgccaagtacttcttctacagcaacatcatgaactttttcaagaccgagattaccctggccaacggcgagatccggaagcggcctctgatcgagacaaacggcgaaacaggcgagatcgtgtgggataagggccgggactttgccaccgtgcggaaagtgctgtctatgccccaagtgaatatcgtgaaaaagaccgaggtgcagacaggcggcttcagcaaagagtctatcctgcccaagaggaacagcgacaagctgatcgccagaaagaaggactgggaccctaagaagtacggcggcttcgacagccccaccgtggcctattctgtgctggtggtggccaaagtggaaaagggcaagtccaagaaactgaagagtgtgaaagagctgctggggatcaccatcatggaaagaagcagcttcgagaagaatcccatcgactttctggaagccaagggctacaaagaagtgaaaaaggacctgatcatcaagctgcctaagtactccctgttcgagctggaaaacggccggaagagaatgctggcctctgccggcgaactgcagaagggaaacgaactggccctgccctccaaatatgtgaacttcctgtacctggccagccactatgagaagctgaagggctcccccgaggataatgagcagaaacagctgtttgtggaacagcacaaacactacctggacgagatcatcgagcagatcagcgagttctccaagagagtgatcctggccgacgctaatctggacaaggtgctgagcgcctacaacaagcacagagacaagcctatcagagagcaggccgagaatatcatccacctgtttaccctgaccaatctgggagcccctgccgccttcaagtactttgacaccaccatcgaccggaagaggtacaccagcaccaaagaggtgctggacgccaccctgatccaccagagcatcaccggcctgtacgagacacggatcgacctgtctcagctgggaggcgacgcctatccctatgacgtgcccgattatgccagcctgggcagcggctcccccaagaaaaaacgcaaggtggaagatcctaagaaaaagcggaaagtggacggcggagggccgagctctggcgcacccccaccaagtggagggtctcctgccgggtccccaacatctactgaagaaggcaccagcgaatccgcaacgcccgagtcaggccctggtacctccacagaaccatctgaaggtagtgcgcctggttccccagctggaagccctacttccaccgaagaaggcacgtcaaccgaaccaagtgaaggatctgcccctgggaccagcactgaaccatctgagatgaacaattcccagggaagagtgaccttcgaggacgtgaccgtgaacttcacccaaggcgagtggcagagactgaaccccgagcagagaaacctgtaccgggacgtgatgctggaaaactacagcaacctggtgtccgtcggccagggcgagacaacaaagcctgacgtgatcctgcggctggaacagggcaaagagccttggctggaagaggaagaggtgctcggatctggcagagccgagaagaatggcgatatcggcggacagatctggaagccaaaggatgtgaaagagagtctcagcggcagcgagacccccggtaccagcgagagcgctacacccgaatccggccccggcagccccgccggcagccctacaagcaccgaggagggcacctccgaatccgccacccctgagagcggacccggcagcgagcctgccacaagcggcagcgagacacctggaacaagcgagagcgccacacctgaaagcggccccggaacatccaccgagcctagcgagggcagcgcccctggcacaagcacagagccttccgagagcgccacccccgagagcatgggccctatggagatatacaagacagtgtctgcatggaagagacagccagtgcgggtactgagcctcttcagaaacatcgacaaggtactaaagagtttgggcttcttggaaagcggttctggttctgggggaggaacgctgaagtacgtggaagatgtcacaaatgtcgtgaggagagacgtggagaaatggggcccctttgacctggtgtacggctcgacgcagcccctaggcagctcttgtgatcgctgtcccggctggtacatgttccagttccaccggatcctgcagtatgcgctgcctcgccaggagagtcagcggcccttcttctggatattcatggacaatctgctgctgactgaggatgaccaagagacaactacccgcttccttcagacagaggctgtgaccctccaggatgtccgtggcagagactaccagaatgctatgcgggtgtggagcaacattccagggctgaagagcaagcatgcgcccctgaccccaaaggaagaagagtatctgcaagcccaagtcagaagcaggagcaagctggacgccccgaaagttgacctcctggtgaagaactgccttctcccgctgagagagtacttcaagtatttttctcaaaactcacttcctctttctagcggcaatagtaacgctaacagccgcgggccgagcttcagcagcggcctggtgccgttgagcttgcgcggcagccatatgaaccatgaccaggaatttgaccccccaaaggtttacccacctgtgccagctgagaagaggaagcccatccgcgtgctgtctctctttgatgggattgctacagggctcctggtgctgaaggacctgggcatccaagtggaccgctacattgcctccgaggtgtgtgaggactccatcacggtgggcatggtgcggcaccagggaaagatcatgtacgtcggggacgtccgcagcgtcacacagaagcatatccaggagtggggcccattcgacctggtgattggaggcagtccctgcaatgacctctccattgtcaaccctgcccgcaagggactttatgagggtactggccgcctcttctttgagttctaccgcctcctgcatgatgcgcggcccaaggagggagatgatcgccccttcttctggctctttgagaatgtggtggccatgggcgttagtgacaagagggacatctcgcgatttcttgagtctaaccccgtgatgattgacgccaaagaagtgtctgctgcacacagggcccgttacttctggggtaaccttcctggcatgaacaggcctttggcatccactgtgaatgataagctggagctgcaagagtgtctggagcacggcagaatagccaagttcagcaaagtgaggaccattaccaccaggtcaaactctataaagcagggcaaagaccagcatttccccgtcttcatgaacgagaaggaggacatcctgtggtgcactgaaatggaaagggtgtttggcttccccgtccactacacagacgtctccaacatgagccgcttggcgaggcagagactgctgggccgatcgtggagcgtgccggtcatccgccacctcttcgctccgctgaaggaatattttgcttgtgtgtgataatagggatcccaagcacgcagcaatgcagctcaaaacgcttagcctagccacacccccacgggaaacagcagtgattaacctttagcaataaacgaaagtttaactaagctatactaaccccagggttggtcaatttcgtgccagccacaccctggtactgcatgcacgcaatgctagctgcccctttcccgtcctgggcaccccgagtctcccccgaccccgggtcccaggtatgctcccacctccacctgccccactcaccacctctgctagttccagacacctccgaagatgg

SEQ ID NO: 268 - RNA, 7087 nt, synthetic construct
  misc_feature 1..7087: note = V16 mRNA
  source 1..7087: mol_type = other RNA
aggactcactatttgttttcgcgcccagttgcaaaaagtgtcgacatttgcttctgacacaactgtgttcactagcaacctcaaacagacaccgccaccatggtccctgctgctaagagagtgaaactggatggatccgacaagaagtacagcatcggcctggccatcggcaccaactctgtgggctgggccgtgatcaccgacgagtacaaggtgcccagcaagaaattcaaggtgctgggcaacaccgaccggcacagcatcaagaagaacctgatcggcgccctgctgttcgacagcggagaaacagccgaggccacccggctgaagagaaccgccagaagaagatacaccagacggaagaaccggatctgctatctgcaagagatcttcagcaacgagatggccaaggtggacgacagcttcttccacagactggaagagtccttcctggtggaagaggataagaagcacgagcggcaccccatcttcggcaacatcgtggacgaggtggcctaccacgagaagtaccccaccatctaccacctgagaaagaaactggtggacagcaccgacaaggccgacctgcggctgatctatctggccctggcccacatgatcaagttccggggccacttcctgatcgagggcgacctgaaccccgacaacagcgacgtggacaagctgttcatccagctggtgcagacctacaaccagctgttcgaggaaaaccccatcaacgccagcggcgtggacgccaaggccatcctgtctgccagactgagcaagagcagacggctggaaaatctgatcgcccagctgcccggcgagaagaagaatggcctgttcggcaacctgattgccctgagcctgggcctgacccccaacttcaagagcaacttcgacctggccgaggatgccaaactgcagctgagcaaggacacctacgacgacgacctggacaacctgctggcccagatcggcgaccagtacgccgacctgtttctggccgccaagaacctgtccgacgccatcctgctgagcgacatcctgagagtgaacaccgagatcaccaaggcccccctgagcgcctctatgatcaagagatacgacgagcaccaccaggacctgaccctgctgaaagctctcgtgcggcagcagctgcctgagaagtacaaagagattttcttcgaccagagcaagaacggctacgccggctacatcgatggcggagccagccaggaagagttctacaagttcatcaagcccatcctggaaaagatggacggcaccgaggaactgctcgtgaagctgaacagagaggacctgctgcggaagcagcggaccttcgacaacggcagcatcccccaccagatccacctgggagagctgcacgccattctgcggcggcaggaagatttttacccattcctgaaggacaaccgggaaaagatcgagaagatcctgaccttccgcatcccctactacgtgggccctctggccaggggaaacagcagattcgcctggatgaccagaaagagcgaggaaaccatcaccccctggaacttcgaggaagtggtggacaagggcgccagcgcccagagcttcatcgagcggatgaccaacttcgataagaacctgcccaacgagaaggtgctgcccaagcacagcctgctgtacgagtacttcaccgtgtacaacgagctgaccaaagtgaaatacgtgaccgagggaatgagaaagcccgccttcctgagcggcgagcagaaaaaagccatcgtggacctgctgttcaagaccaaccggaaagtgaccgtgaagcagctgaaagaggactacttcaagaaaatcgagtgcttcgactccgtggaaatctccggcgtggaagatcggttcaacgcctccctgggcacataccacgatctgctgaaaattatcaaggacaaggacttcctggacaatgaggaaaacgaggacattctggaagatatcgtgctgaccctgacactgtttgaggacagagagatgatcgaggaacggctgaaaacctatgcccacctgttcgacgacaaagtgatgaagcagctgaagcggcggagatacaccggctggggcaggctgagccggaagctgatcaacggcatccgggacaagcagtccggcaagacaatcctggatttcctgaagtccgacggcttcgccaacagaaacttcatgcagctgatccacgacgacagcctgacctttaaagaggacatccagaaagcccaggtgtccggccagggcgatagcctgcacgagcacattgccaatctggccggcagccccgccattaagaagggcatcctgcagacagtgaaggtggtggacgagctcgtgaaagtgatgggccggcacaagcccgagaacatcgtgatcgaaatggccagagagaaccagaccacccagaagggacagaagaacagccgcgagagaatgaagcggatcgaagagggcatcaaagagctgggcagccagatcctgaaagaacaccccgtggaaaacacccagctgcagaacgagaagctgtacctgtactacctgcagaatgggcgggatatgtacgtggaccaggaactggacatcaaccggctgtccgactacgatgtggacgctatcgtgcctcagagctttctgaaggacgactccatcgataacaaagtgctgactcggagcgacaagaaccggggcaagagcgacaacgtgccctccgaagaggtcgtgaagaagatgaagaactactggcgccagctgctgaatgccaagctgattacccagaggaagttcgacaatctgaccaaggccgagagaggcggcctgagcgaactggataaggccggcttcatcaagagacagctggtggaaacccggcagatcacaaagcacgtggcacagatcctggactcccggatgaacactaagtacgacgagaacgacaaactgatccgggaagtgaaagtgatcaccctgaagtccaagctggtgtccgatttccggaaggatttccagttttacaaagtgcgcgagatcaacaactaccaccacgcccacgacgcctacctgaacgccgtcgtgggaaccgccctgatcaaaaagtaccctaagctggaaagcgagttcgtgtacggcgactacaaggtgtacgacgtgcggaagatgatcgccaagagcgagcaggaaatcggcaaggctaccgccaagtacttcttctacagcaacatcatgaactttttcaagaccgagattaccctggccaacggcgagatccggaagcggcctctgatcgagacaaacggcgaaacaggcgagatcgtgtgggataagggccgggactttgccaccgtgcggaaagtgctgtctatgccccaagtgaatatcgtgaaaaagaccgaggtgcagacaggcggcttcagcaaagagtctatcctgcccaagaggaacagcgacaagctgatcgccagaaagaaggactgggaccctaagaagtacggcggcttcgacagccccaccgtggcctattctgtgctggtggtggccaaagtggaaaagggcaagtccaagaaactgaagagtgtgaaagagctgctggggatcaccatcatggaaagaagcagcttcgagaagaatcccatcgactttctggaagccaagggctacaaagaagtgaaaaaggacctgatcatcaagctgcctaagtactccctgttcgagctggaaaacggccggaagagaatgctggcctctgccggcgaactgcagaagggaaacgaactggccctgccctccaaatatgtgaacttcctgtacctggccagccactatgagaagctgaagggctcccccgaggataatgagcagaaacagctgtttgtggaacagcacaaacactacctggacgagatcatcgagcagatcagcgagttctccaagagagtgatcctggccgacgctaatctggacaaggtgctgagcgcctacaacaagcacagagacaagcctatcagagagcaggccgagaatatcatccacctgtttaccctgaccaatctgggagcccctgccgccttcaagtactttgacaccaccatcgaccggaagaggtacaccagcaccaaagaggtgctggacgccaccctgatccaccagagcatcaccggcctgtacgagacacggatcgacctgtctcagctgggaggcgacgcctatccctatgacgtgcccgattatgccagcctgggcagcggctcccccaagaaaaaacgcaaggtggaagatcctaagaaaaagcggaaagtggacggcggagggccgagctctggcgcacccccaccaagtggagggtctcctgccgggtccccaacatctactgaagaaggcaccagcgaatccgcaacgcccgagtcaggccctggtacctccacagaaccatctgaaggtagtgcgcctggttccccagctggaagccctacttccaccgaagaaggcacgtcaaccgaaccaagtgaaggatctgcccctgggaccagcactgaaccatctgagatgaacaattcccagggaagagtgaccttcgaggacgtgaccgtgaacttcacccaaggcgagtggcagagactgaaccccgagcagagaaacctgtaccgggacgtgatgctggaaaactacagcaacctggtgtccgtcggccagggcgagacaacaaagcctgacgtgatcctgcggctggaacagggcaaagagccttggctggaagaggaagaggtgctcggatctggcagagccgagaagaatggcgatatcggcggacagatctggaagccaaaggatgtgaaagagagtctcagcggcagcgagacccccggtaccagcgagggcggccctagcagcggcgcccctccccctagcggcggcagccctgccggatcccctacaagcaccgaagaaggcacaagcgagtccgctacccctgagtccggccctggcacctccacagagcctagcgagggatccgctcctggatcccctgccggaagccctacctccaccgaggagggcacaagcaccgagccttccgagggcagcgcccccggaacaagcaccgaacctagcgagagcgccacccccgagagcatgttcgaaaccgtgcctgtgtggaggagacagccagtccgggtgctgtccctttttgaagacatcaagaaagagctgacgagtttgggctttttggaaagtggttctgacccgggacaactgaagcatgtggttgatgtcacagacacagtgaggaaggatgtggaggagtggggacccttcgatcttgtgtacggcgccacacctcccctgggccacacctgtgaccgtcctcccagctggtacctgttccagttccaccggctcctgcagtacgcacggcccaagccaggcagccccaggcccttcttctggatgttcgtggacaatctggtgctgaacaaggaagacctggacgtcgcatctcgcttcctggagatggagccagtcaccatcccagatgtccacggcggatccttgcagaatgctgtccgcgtgtggagcaacatcccagccataaggagcagcaggcactgggctctggtttcggaagaagaattgtccctgctggcccagaacaagcagagctcgaagctcgcggccaagtggcccaccaagctggtgaagaactgctttctccccctaagagaatatttcaagtatttttcaacagaactcacttcctctttatctagcggcaatagtaacgctaacagccgcgggccgagcttcagcagcggcctggtgccgttgagcttgcgcggcagccatatgaaccatgaccaggaatttgaccccccaaaggtttacccacctgtgccagctgagaagaggaagcccatccgcgtgctgtctctctttgatgggattgctacagggctcctggtgctgaaggacctgggcatccaagtggaccgctacattgcctccgaggtgtgtgaggactccatcacggtgggcatggtgcggcaccagggaaagatcatgtacgtcggggacgtccgcagcgtcacacagaagcatatccaggagtggggcccattcgacctggtgattggaggcagtccctgcaatgacctctccattgtcaaccctgcccgcaagggactttatgagggtactggccgcctcttctttgagttctaccgcctcctgcatgatgcgcggcccaaggagggagatgatcgccccttcttctggctctttgagaatgtggtggccatgggcgttagtgacaagagggacatctcgcgatttcttgagtctaaccccgtgatgattgacgccaaagaagtgtctgctgcacacagggcccgttacttctggggtaaccttcctggcatgaacaggcctttggcatccactgtgaatgataagctggagctgcaagagtgtctggagcacggcagaatagccaagttcagcaaagtgaggaccattaccaccaggtcaaactctataaagcagggcaaagaccagcatttccccgtcttcatgaacgagaaggaggacatcctgtggtgcactgaaatggaaagggtgtttggcttccccgtccactacacagacgtctccaacatgagccgcttggcgaggcagagactgctgggccgatcgtggagcgtgccggtcatccgccacctcttcgctccgctgaaggaatattttgcttgtgtgtgataatagggatcccaagcacgcagcaatgcagctcaaaacgcttagcctagccacacccccacgggaaacagcagtgattaacctttagcaataaacgaaagtttaactaagctatactaaccccagggttggtcaatttcgtgccagccacaccctggtactgcatgcacgcaatgctagctgcccctttcccgtcctgggcaccccgagtctcccccgaccccgggtcccaggtatgctcccacctccacctgccccactcaccacctctgctagttccagacacctccgaagatgg

SEQ ID NO: 269 - RNA, 6887 nt, synthetic construct
  misc_feature 1..6887: note = V17 mRNA
  source 1..6887: mol_type = other RNA
aggactcactatttgttttcgcgcccagttgcaaaaagtgtcgacatttgcttctgacacaactgtgttcactagcaacctcaaacagacaccgccaccatgcctgctgctaagagagtgaaactggatggatccaaccatgaccaggaatttgaccccccaaaggtttacccacctgtgccagctgagaagaggaagcccatccgcgtgctgtctctctttgatgggattgctacagggctcctggtgctgaaggacctgggcatccaagtggaccgctacattgcctccgaggtgtgtgaggactccatcacggtgggcatggtgcggcaccagggaaagatcatgtacgtcggggacgtccgcagcgtcacacagaagcatatccaggagtggggcccattcgacctggtgattggaggcagtccctgcaatgacctctccattgtcaaccctgcccgcaagggactttatgagggtactggccgcctcttctttgagttctaccgcctcctgcatgatgcgcggcccaaggagggagatgatcgccccttcttctggctctttgagaatgtggtggccatgggcgttagtgacaagagggacatctcgcgatttcttgagtctaaccccgtgatgattgacgccaaagaagtgtctgctgcacacagggcccgttacttctggggtaaccttcctggcatgaacaggcctttggcatccactgtgaatgataagctggagctgcaagagtgtctggagcacggcagaatagccaagttcagcaaagtgaggaccattaccaccaggtcaaactctataaagcagggcaaagaccagcatttccccgtgttcatgaacgagaaggaggacatcctgtggtgcactgaaatggaaagggtgtttggcttccccgtccactacacagacgtctccaacatgagccgcttggcgaggcagagactgctgggccgatcgtggagcgtgccggtcatccgccacctcttcgctccgctgaaggaatattttgcttgtgtgtctagcggcaatagtaacgctaacagccgcgggccgagcttcagcagcggcctggtgccgttaagcttgcgcggcagccatatgggccctatggagatatacaagacagtgtctgcatggaagagacagccagtgcgggtactgagcctcttcagaaacatcgacaaggtactaaagagtttgggcttcttggaaagcggttctggttctgggggaggaacgctgaagtacgtggaagatgtcacaaatgtcgtgaggagagacgtggagaaatggggcccctttgacctggtgtacggctcgacgcagcccctaggcagctcttgtgatcgctgtcccggctggtacatgttccagttccaccggatcctgcagtatgcgctgcctcgccaggagagtcagcggcccttcttctggatattcatggacaatctgctgctgactgaggatgaccaagagacaactacccgcttccttcagacagaggctgtgaccctccaggatgtccgtggcagagactaccagaatgctatgcgggtgtggagcaacattccagggctgaagagcaagcatgcgcccctgaccccaaaggaagaagagtatctgcaagcccaagtcagaagcaggagcaagctggacgccccgaaagttgacctcctggtgaagaactgccttctcccgctgagagagtacttcaagtatttttctcaaaactcacttcctcttggagggccgagctctggcgcacccccaccaagtggagggtctcctgccgggtccccaacatctactgaagaaggcaccagcgaatccgcaacgcccgagtcaggccctggtacctccacagaaccatctgaaggtagtgcgcctggttccccagctggaagccctacttccaccgaagaaggcacgtcaaccgaaccaagtgaaggatctgcccctgggaccagcactgaaccatctgagccaaaaaagaagagaaaggtaatggacaagaagtacagcatcggcctggccatcggcaccaactctgtgggctgggccgtgatcaccgacgagtacaaggtgcccagcaagaaattcaaggtgctgggcaacaccgaccggcacagcatcaagaagaacctgatcggcgccctgctgttcgacagcggagaaacagccgaggccacccggctgaagagaaccgccagaagaagatacaccagacggaagaaccggatctgctatctgcaagagatcttcagcaacgagatggccaaggtggacgacagcttcttccacagactggaagagtccttcctggtggaagaggataagaagcacgagcggcaccccatcttcggcaacatcgtggacgaggtggcctaccacgagaagtaccccaccatctaccacctgagaaagaaactggtggacagcaccgacaaggccgacctgcggctgatctatctggccctggcccacatgatcaagttccggggccacttcctgatcgagggcgacctgaaccccgacaacagcgacgtggacaagctgttcatccagctggtgcagacctacaaccagctgttcgaggaaaaccccatcaacgccagcggcgtggacgccaaggccatcctgtctgccagactgagcaagagcagacggctggaaaatctgatcgcccagctgcccggcgagaagaagaatggcctgttcggcaacctgattgccctgagcctgggcctgacccccaacttcaagagcaacttcgacctggccgaggatgccaaactgcagctgagcaaggacacctacgacgacgacctggacaacctgctggcccagatcggcgaccagtacgccgacctgtttctggccgccaagaacctgtccgacgccatcctgctgagcgacatcctgagagtgaacaccgagatcaccaaggcccccctgagcgcctctatgatcaagagatacgacgagcaccaccaggacctgaccctgctgaaagctctcgtgcggcagcagctgcctgagaagtacaaagagattttcttcgaccagagcaagaacggctacgccggctacatcgatggcggagccagccaggaagagttctacaagttcatcaagcccatcctggaaaagatggacggcaccgaggaactgctcgtgaagctgaacagagaggacctgctgcggaagcagcggaccttcgacaacggcagcatcccccaccagatccacctgggagagctgcacgccattctgcggcggcaggaagatttttacccattcctgaaggacaaccgggaaaagatcgagaagatcctgaccttccgcatcccctactacgtgggccctctggccaggggaaacagcagattcgcctggatgaccagaaagagcgaggaaaccatcaccccctggaacttcgaggaagtggtggacaagggcgccagcgcccagagcttcatcgagcggatgaccaacttcgataagaacctgcccaacgagaaggtgctgcccaagcacagcctgctgtacgagtacttcaccgtgtacaacgagctgaccaaagtgaaatacgtgaccgagggaatgagaaagcccgccttcctgagcggcgagcagaaaaaagccatcgtggacctgctgttcaagaccaaccggaaagtgaccgtgaagcagctgaaagaggactacttcaagaaaatcgagtgcttcgactccgtggaaatctccggcgtggaagatcggttcaacgcctccctgggcacataccacgatctgctgaaaattatcaaggacaaggacttcctggacaatgaggaaaacgaggacattctggaagatatcgtgctgaccctgacactgtttgaggacagagagatgatcgaggaacggctgaaaacctatgcccacctgttcgacgacaaagtgatgaagcagctgaagcggcggagatacaccggctggggcaggctgagccggaagctgatcaacggcatccgggacaagcagtccggcaagacaatcctggatttcctgaagtccgacggcttcgccaacagaaacttcatgcagctgatccacgacgacagcctgacctttaaagaggacatccagaaagcccaggtgtccggccagggcgatagcctgcacgagcacattgccaatctggccggcagccccgccattaagaagggcatcctgcagacagtgaaggtggtggacgagctcgtgaaagtgatgggccggcacaagcccgagaacatcgtgatcgaaatggccagagagaaccagaccacccagaagggacagaagaacagccgcgagagaatgaagcggatcgaagagggcatcaaagagctgggcagccagatcctgaaagaacaccccgtggaaaacacccagctgcagaacgagaagctgtacctgtactacctgcagaatgggcgggatatgtacgtggaccaggaactggacatcaaccggctgtccgactacgatgtggacgctatcgtgcctcagagctttctgaaggacgactccatcgataacaaagtgctgactcggagcgacaagaaccggggcaagagcgacaacgtgccctccgaagaggtcgtgaagaagatgaagaactactggcgccagctgctgaatgccaagctgattacccagaggaagttcgacaatctgaccaaggccgagagaggcggcctgagcgaactggataaggccggcttcatcaagagacagctggtggaaacccggcagatcacaaagcacgtggcacagatcctggactcccggatgaacactaagtacgacgagaacgacaaactgatccgggaagtgaaagtgatcaccctgaagtccaagctggtgtccgatttccggaaggatttccagttttacaaagtgcgcgagatcaacaactaccaccacgcccacgacgcctacctgaacgccgtcgtgggaaccgccctgatcaaaaagtaccctaagctggaaagcgagttcgtgtacggcgactacaaggtgtacgacgtgcggaagatgatcgccaagagcgagcaggaaatcggcaaggctaccgccaagtacttcttctacagcaacatcatgaactttttcaagaccgagattaccctggccaacggcgagatccggaagcggcctctgatcgagacaaacggcgaaacaggcgagatcgtgtgggataagggccgggactttgccaccgtgcggaaagtgctgtctatgccccaagtgaatatcgtgaaaaagaccgaggtgcagacaggcggcttcagcaaagagtctatcctgcccaagaggaacagcgacaagctgatcgccagaaagaaggactgggaccctaagaagtacggcggcttcgacagccccaccgtggcctattctgtgctggtggtggccaaagtggaaaagggcaagtccaagaaactgaagagtgtgaaagagctgctggggatcaccatcatggaaagaagcagcttcgagaagaatcccatcgactttctggaagccaagggctacaaagaagtgaaaaaggacctgatcatcaagctgcctaagtactccctgttcgagctggaaaacggccggaagagaatgctggcctctgccggcgaactgcagaagggaaacgaactggccctgccctccaaatatgtgaacttcctgtacctggccagccactatgagaagctgaagggctcccccgaggataatgagcagaaacagctgtttgtggaacagcacaaacactacctggacgagatcatcgagcagatcagcgagttctccaagagagtgatcctggccgacgctaatctggacaaggtgctgagcgcctacaacaagcacagagacaagcctatcagagagcaggccgagaatatcatccacctgtttaccctgaccaatctgggagcccctgccgccttcaagtactttgacaccaccatcgaccggaagaggtacaccagcaccaaagaggtgctggacgccaccctgatccaccagagcatcaccggcctgtacgagacacggatcgacctgtctcagctgggaggcgacgcctatccctatgacgtgcccgattatgccagcctgggcagcggctcccccaagaaaaaacgcaaggtggaagatcctaagaaaaagcggaaagtggacggcagcggcagcgagacccccggtaccagcgagagcgccacccccgagagcatgaacaattcccagggaagagtgaccttcgaggatgtcactgtgaacttcacccagggggagtggcagcggctgaatcccgaacagagaaacttgtacagggatgtgatgctggagaattacagcaaccttgtctctgtgggacaaggggaaaccaccaaacccgatgtgatcttgaggttggaacaaggaaaggagccatggttggaggaagaggaagtgctgggaagtggccgtgcagaaaaaaatggggacattggagggcagatttggaagccaaaggatgtgaaagagagtctcctcgagtgataatagggatcccaagcacgcagcaatgcagctcaaaacgcttagcctagccacacccccacgggaaacagcagtgattaacctttagcaataaacgaaagtttaactaagctatactaaccccagggttggtcaatttcgtgccagccacaccctggtactgcatgcacgcaatgctagctgcccctttcccgtcctgggcaccccgagtctcccccgaccccgggtcccaggtatgctcccacctccacctgccccactcaccacctctgctagttccagacacctccgagacgagg

SEQ ID NO: 270 - RNA, 6724 nt, synthetic construct
  misc_feature 1..6724: note = V18 mRNA
  source 1..6724: mol_type = other RNA
aggactcactatttgttttcgcgcccagttgcaaaaagtgtcgacatttgcttctgacacaactgtgttcactagcaacctcaaacagacaccgccaccatgcctgctgctaagagagtgaaactggatggatccaaccatgaccaggaatttgaccccccaaaggtttacccacctgtgccagctgagaagaggaagcccatccgcgtgctgtctctctttgatgggattgctacagggctcctggtgctgaaggacctgggcatccaagtggaccgctacattgcctccgaggtgtgtgaggactccatcacggtgggcatggtgcggcaccagggaaagatcatgtacgtcggggacgtccgcagcgtcacacagaagcatatccaggagtggggcccattcgacctggtgattggaggcagtccctgcaatgacctctccattgtcaaccctgcccgcaagggactttatgagggtactggccgcctcttctttgagttctaccgcctcctgcatgatgcgcggcccaaggagggagatgatcgccccttcttctggctctttgagaatgtggtggccatgggcgttagtgacaagagggacatctcgcgatttcttgagtctaaccccgtgatgattgacgccaaagaagtgtctgctgcacacagggcccgttacttctggggtaaccttcctggcatgaacaggcctttggcatccactgtgaatgataagctggagctgcaagagtgtctggagcacggcagaatagccaagttcagcaaagtgaggaccattaccaccaggtcaaactctataaagcagggcaaagaccagcatttccccgtgttcatgaacgagaaggaggacatcctgtggtgcactgaaatggaaagggtgtttggcttccccgtccactacacagacgtctccaacatgagccgcttggcgaggcagagactgctgggccgatcgtggagcgtgccggtcatccgccacctcttcgctccgctgaaggaatattttgcttgtgtgtctagcggcaatagtaacgctaacagccgcgggccgagcttcagcagcggcctggtgccgttaagcttgcgcggcagccatatgttcgaaaccgtgcctgtgtggaggagacagccagtccgggtgctgtccctttttgaagacatcaagaaagagctgacgagtttgggctttttggaaagtggttctgacccgggacaactgaagcatgtggttgatgtcacagacacagtgaggaaggatgtggaggagtggggacccttcgatcttgtgtacggcgccacacctcccctgggccacacctgtgaccgtcctcccagctggtacctgttccagttccaccggctcctgcagtacgcacggcccaagccaggcagccccaggcccttcttctggatgttcgtggacaatctggtgctgaacaaggaagacctggacgtcgcatctcgcttcctggagatggagccagtcaccatcccagatgtccacggcggatccttgcagaatgctgtccgcgtgtggagcaacatcccagccataaggagcagcaggcactgggctctggtttcggaagaagaattgtccctgctggcccagaacaagcagagctcgaagctcgcggccaagtggcccaccaagctggtgaagaactgctttctccccctaagagaatatttcaagtatttttcaggagggccgagctctggcgcacccccaccaagtggagggtctcctgccgggtccccaacatctactgaagaaggcaccagcgaatccgcaacgcccgagtcaggccctggtacctccacagaaccatctgaaggtagtgcgcctggttccccagctggaagccctacttccaccgaagaaggcacgtcaaccgaaccaagtgaaggatctgcccctgggaccagcactgaaccatctgagccaaaaaagaagagaaaggtaatggacaagaagtacagcatcggcctggccatcggcaccaactctgtgggctgggccgtgatcaccgacgagtacaaggtgcccagcaagaaattcaaggtgctgggcaacaccgaccggcacagcatcaagaagaacctgatcggcgccctgctgttcgacagcggagaaacagccgaggccacccggctgaagagaaccgccagaagaagatacaccagacggaagaaccggatctgctatctgcaagagatcttcagcaacgagatggccaaggtggacgacagcttcttccacagactggaagagtccttcctggtggaagaggataagaagcacgagcggcaccccatcttcggcaacatcgtggacgaggtggcctaccacgagaagtaccccaccatctaccacctgagaaagaaactggtggacagcaccgacaaggccgacctgcggctgatctatctggccctggcccacatgatcaagttccggggccacttcctgatcgagggcgacctgaaccccgacaacagcgacgtggacaagctgttcatccagctggtgcagacctacaaccagctgttcgaggaaaaccccatcaacgccagcggcgtggacgccaaggccatcctgtctgccagactgagcaagagcagacggctggaaaatctgatcgcccagctgcccggcgagaagaagaatggcctgttcggcaacctgattgccctgagcctgggcctgacccccaacttcaagagcaacttcgacctggccgaggatgccaaactgcagctgagcaaggacacctacgacgacgacctggacaacctgctggcccagatcggcgaccagtacgccgacctgtttctggccgccaagaacctgtccgacgccatcctgctgagcgacatcctgagagtgaacaccgagatcaccaaggcccccctgagcgcctctatgatcaagagatacgacgagcaccaccaggacctgaccctgctgaaagctctcgtgcggcagcagctgcctgagaagtacaaagagattttcttcgaccagagcaagaacggctacgccggctacatcgatggcggagccagccaggaagagttctacaagttcatcaagcccatcctggaaaagatggacggcaccgaggaactgctcgtgaagctgaacagagaggacctgctgcggaagcagcggaccttcgacaacggcagcatcccccaccagatccacctgggagagctgcacgccattctgcggcggcaggaagatttttacccattcctgaaggacaaccgggaaaagatcgagaagatcctgaccttccgcatcccctactacgtgggccctctggccaggggaaacagcagattcgcctggatgaccagaaagagcgaggaaaccatcaccccctggaacttcgaggaagtggtggacaagggcgccagcgcccagagcttcatcgagcggatgaccaacttcgataagaacctgcccaacgagaaggtgctgcccaagcacagcctgctgtacgagtacttcaccgtgtacaacgagctgaccaaagtgaaatacgtgaccgagggaatgagaaagcccgccttcctgagcggcgagcagaaaaaagccatcgtggacctgctgttcaagaccaaccggaaagtgaccgtgaagcagctgaaagaggactacttcaagaaaatcgagtgcttcgactccgtggaaatctccggcgtggaagatcggttcaacgcctccctgggcacataccacgatctgctgaaaattatcaaggacaaggacttcctggacaatgaggaaaacgaggacattctggaagatatcgtgctgaccctgacactgtttgaggacagagagatgatcgaggaacggctgaaaacctatgcccacctgttcgacgacaaagtgatgaagcagctgaagcggcggagatacaccggctggggcaggctgagccggaagctgatcaacggcatccgggacaagcagtccggcaagacaatcctggatttcctgaagtccgacggcttcgccaacagaaacttcatgcagctgatccacgacgacagcctgacctttaaagaggacatccagaaagcccaggtgtccggccagggcgatagcctgcacgagcacattgccaatctggccggcagccccgccattaagaagggcatcctgcagacagtgaaggtggtggacgagctcgtgaaagtgatgggccggcacaagcccgagaacatcgtgatcgaaatggccagagagaaccagaccacccagaagggacagaagaacagccgcgagagaatgaagcggatcgaagagggcatcaaagagctgggcagccagatcctgaaagaacaccccgtggaaaacacccagctgcagaacgagaagctgtacctgtactacctgcagaatgggcgggatatgtacgtggaccaggaactggacatcaaccggctgtccgactacgatgtggacgctatcgtgcctcagagctttctgaaggacgactccatcgataacaaagtgctgactcggagcgacaagaaccggggcaagagcgacaacgtgccctccgaagaggtcgtgaagaagatgaagaactactggcgccagctgctgaatgccaagctgattacccagaggaagttcgacaatctgaccaaggccgagagaggcggcctgagcgaactggataaggccggcttcatcaagagacagctggtggaaacccggcagatcacaaagcacgtggcacagatcctggactcccggatgaacactaagtacgacgagaacgacaaactgatccgggaagtgaaagtgatcaccctgaagtccaagctggtgtccgatttccggaaggatttccagttttacaaagtgcgcgagatcaacaactaccaccacgcccacgacgcctacctgaacgccgtcgtgggaaccgccctgatcaaaaagtaccctaagctggaaagcgagttcgtgtacggcgactacaaggtgtacgacgtgcggaagatgatcgccaagagcgagcaggaaatcggcaaggctaccgccaagtacttcttctacagcaacatcatgaactttttcaagaccgagattaccctggccaacggcgagatccggaagcggcctctgatcgagacaaacggcgaaacaggcgagatcgtgtgggataagggccgggactttgccaccgtgcggaaagtgctgtctatgccccaagtgaatatcgtgaaaaagaccgaggtgcagacaggcggcttcagcaaagagtctatcctgcccaagaggaacagcgacaagctgatcgccagaaagaaggactgggaccctaagaagtacggcggcttcgacagccccaccgtggcctattctgtgctggtggtggccaaagtggaaaagggcaagtccaagaaactgaagagtgtgaaagagctgctggggatcaccatcatggaaagaagcagcttcgagaagaatcccatcgactttctggaagccaagggctacaaagaagtgaaaaaggacctgatcatcaagctgcctaagtactccctgttcgagctggaaaacggccggaagagaatgctggcctctgccggcgaactgcagaagggaaacgaactggccctgccctccaaatatgtgaacttcctgtacctggccagccactatgagaagctgaagggctcccccgaggataatgagcagaaacagctgtttgtggaacagcacaaacactacctggacgagatcatcgagcagatcagcgagttctccaagagagtgatcctggccgacgctaatctggacaaggtgctgagcgcctacaacaagcacagagacaagcctatcagagagcaggccgagaatatcatccacctgtttaccctgaccaatctgggagcccctgccgccttcaagtactttgacaccaccatcgaccggaagaggtacaccagcaccaaagaggtgctggacgccaccctgatccaccagagcatcaccggcctgtacgagacacggatcgacctgtctcagctgggaggcgacgcctatccctatgacgtgcccgattatgccagcctgggcagcggctcccccaagaaaaaacgcaaggtggaagatcctaagaaaaagcggaaagtggacggcagcggcagcgagacccccggtaccagcgagagcgccacccccgagagccggacactggtgaccttcaaggatgtatttgtggacttcaccagggaggagtggaagctgctggacactgctcagcagatcgtgtacagaaatgtgatgctggagaactataagaacctggtttccttgggttatcagcttactaagccagatgtgatcctccggttggagaagggagaagagccctgagatcccaagcacgcagcaatgcagctcaaaacgcttagcctagccacacccccacgggaaacagcagtgattaacctttagcaataaacgaaagtttaactaagctatactaaccccagggttggtcaatttcgtgccagccacaccctggtactgcatgcacgcaatgctagctgcccctttcccgtcctgggcaccccgagtctcccccgaccccgggtcccaggtatgctcccacctccacctgccccactcaccacctctgctagttccagacacctccgagacgagg

SEQ ID NO: 271 - RNA, 6775 nt, synthetic construct
  misc_feature 1..6775: note = V19 mRNA
  source 1..6775: mol_type = other RNA
aggactcactatttgttttcgcgcccagttgcaaaaagtgtcgacatttgcttctgacacaactgtgttcactagcaacctcaaacagacaccgccaccatgcctgctgctaagagagtgaaactggatggatccaaccatgaccaggaatttgaccccccaaaggtttacccacctgtgccagctgagaagaggaagcccatccgcgtgctgtctctctttgatgggattgctacagggctcctggtgctgaaggacctgggcatccaagtggaccgctacattgcctccgaggtgtgtgaggactccatcacggtgggcatggtgcggcaccagggaaagatcatgtacgtcggggacgtccgcagcgtcacacagaagcatatccaggagtggggcccattcgacctggtgattggaggcagtccctgcaatgacctctccattgtcaaccctgcccgcaagggactttatgagggtactggccgcctcttctttgagttctaccgcctcctgcatgatgcgcggcccaaggagggagatgatcgccccttcttctggctctttgagaatgtggtggccatgggcgttagtgacaagagggacatctcgcgatttcttgagtctaaccccgtgatgattgacgccaaagaagtgtctgctgcacacagggcccgttacttctggggtaaccttcctggcatgaacaggcctttggcatccactgtgaatgataagctggagctgcaagagtgtctggagcacggcagaatagccaagttcagcaaagtgaggaccattaccaccaggtcaaactctataaagcagggcaaagaccagcatttccccgtgttcatgaacgagaaggaggacatcctgtggtgcactgaaatggaaagggtgtttggcttccccgtccactacacagacgtctccaacatgagccgcttggcgaggcagagactgctgggccgatcgtggagcgtgccggtcatccgccacctcttcgctccgctgaaggaatattttgcttgtgtgtctagcggcaatagtaacgctaacagccgcgggccgagcttcagcagcggcctggtgccgttaagcttgcgcggcagccatatgggccctatggagatatacaagacagtgtctgcatggaagagacagccagtgcgggtactgagcctcttcagaaacatcgacaaggtactaaagagtttgggcttcttggaaagcggttctggttctgggggaggaacgctgaagtacgtggaagatgtcacaaatgtcgtgaggagagacgtggagaaatggggcccctttgacctggtgtacggctcgacgcagcccctaggcagctcttgtgatcgctgtcccggctggtacatgttccagttccaccggatcctgcagtatgcgctgcctcgccaggagagtcagcggcccttcttctggatattcatggacaatctgctgctgactgaggatgaccaagagacaactacccgcttccttcagacagaggctgtgaccctccaggatgtccgtggcagagactaccagaatgctatgcgggtgtggagcaacattccagggctgaagagcaagcatgcgcccctgaccccaaaggaagaagagtatctgcaagcccaagtcagaagcaggagcaagctggacgccccgaaagttgacctcctggtgaagaactgccttctcccgctgagagagtacttcaagtatttttctcaaaactcacttcctcttgacggcagcggcagcgagacccccggtaccagcgagagcgccacccccgagagccggacactggtgaccttcaaggatgtatttgtggacttcaccagggaggagtggaagctgctggacactgctcagcagatcgtgtacagaaatgtgatgctggagaactataagaacctggtttccttgggttatcagcttactaagccagatgtgatcctccggttggagaagggagaagagcccggagggccgagctctggcgcacccccaccaagtggagggtctcctgccgggtccccaacatctactgaagaaggcaccagcgaatccgcaacgcccgagtcaggccctggtacctccacagaaccatctgaaggtagtgcgcctggttccccagctggaagccctacttccaccgaagaaggcacgtcaaccgaaccaagtgaaggatctgcccctgggaccagcactgaaccatctgagccaaaaaagaagagaaaggtaatggacaagaagtacagcatcggcctggccatcggcaccaactctgtgggctgggccgtgatcaccgacgagtacaaggtgcccagcaagaaattcaaggtgctgggcaacaccgaccggcacagcatcaagaagaacctgatcggcgccctgctgttcgacagcggagaaacagccgaggccacccggctgaagagaaccgccagaagaagatacaccagacggaagaaccggatctgctatctgcaagagatcttcagcaacgagatggccaaggtggacgacagcttcttccacagactggaagagtccttcctggtggaagaggataagaagcacgagcggcaccccatcttcggcaacatcgtggacgaggtggcctaccacgagaagtaccccaccatctaccacctgagaaagaaactggtggacagcaccgacaaggccgacctgcggctgatctatctggccctggcccacatgatcaagttccggggccacttcctgatcgagggcgacctgaaccccgacaacagcgacgtggacaagctgttcatccagctggtgcagacctacaaccagctgttcgaggaaaaccccatcaacgccagcggcgtggacgccaaggccatcctgtctgccagactgagcaagagcagacggctggaaaatctgatcgcccagctgcccggcgagaagaagaatggcctgttcggcaacctgattgccctgagcctgggcctgacccccaacttcaagagcaacttcgacctggccgaggatgccaaactgcagctgagcaaggacacctacgacgacgacctggacaacctgctggcccagatcggcgaccagtacgccgacctgtttctggccgccaagaacctgtccgacgccatcctgctgagcgacatcctgagagtgaacaccgagatcaccaaggcccccctgagcgcctctatgatcaagagatacgacgagcaccaccaggacctgaccctgctgaaagctctcgtgcggcagcagctgcctgagaagtacaaagagattttcttcgaccagagcaagaacggctacgccggctacatcgatggcggagccagccaggaagagttctacaagttcatcaagcccatcctggaaaagatggacggcaccgaggaactgctcgtgaagctgaacagagaggacctgctgcggaagcagcggaccttcgacaacggcagcatcccccaccagatccacctgggagagctgcacgccattctgcggcggcaggaagatttttacccattcctgaaggacaaccgggaaaagatcgagaagatcctgaccttccgcatcccctactacgtgggccctctggccaggggaaacagcagattcgcctggatgaccagaaagagcgaggaaaccatcaccccctggaacttcgaggaagtggtggacaagggcgccagcgcccagagcttcatcgagcggatgaccaacttcgataagaacctgcccaacgagaaggtgctgcccaagcacagcctgctgtacgagtacttcaccgtgtacaacgagctgaccaaagtgaaatacgtgaccgagggaatgagaaagcccgccttcctgagcggcgagcagaaaaaagccatcgtggacctgctgttcaagaccaaccggaaagtgaccgtgaagcagctgaaagaggactacttcaagaaaatcgagtgcttcgactccgtggaaatctccggcgtggaagatcggttcaacgcctccctgggcacataccacgatctgctgaaaattatcaaggacaaggacttcctggacaatgaggaaaacgaggacattctggaagatatcgtgctgaccctgacactgtttgaggacagagagatgatcgaggaacggctgaaaacctatgcccacctgttcgacgacaaagtgatgaagcagctgaagcggcggagatacaccggctggggcaggctgagccggaagctgatcaacggcatccgggacaagcagtccggcaagacaatcctggatttcctgaagtccgacggcttcgccaacagaaacttcatgcagctgatccacgacgacagcctgacctttaaagaggacatccagaaagcccaggtgtccggccagggcgatagcctgcacgagcacattgccaatctggccggcagccccgccattaagaagggcatcctgcagacagtgaaggtggtggacgagctcgtgaaagtgatgggccggcacaagcccgagaacatcgtgatcgaaatggccagagagaaccagaccacccagaagggacagaagaacagccgcgagagaatgaagcggatcgaagagggcatcaaagagctgggcagccagatcctgaaagaacaccccgtggaaaacacccagctgcagaacgagaagctgtacctgtactacctgcagaatgggcgggatatgtacgtggaccaggaactggacatcaaccggctgtccgactacgatgtggacgctatcgtgcctcagagctttctgaaggacgactccatcgataacaaagtgctgactcggagcgacaagaaccggggcaagagcgacaacgtgccctccgaagaggtcgtgaagaagatgaagaactactggcgccagctgctgaatgccaagctgattacccagaggaagttcgacaatctgaccaaggccgagagaggcggcctgagcgaactggataaggccggcttcatcaagagacagctggtggaaacccggcagatcacaaagcacgtggcacagatcctggactcccggatgaacactaagtacgacgagaacgacaaactgatccgggaagtgaaagtgatcaccctgaagtccaagctggtgtccgatttccggaaggatttccagttttacaaagtgcgcgagatcaacaactaccaccacgcccacgacgcctacctgaacgccgtcgtgggaaccgccctgatcaaaaagtaccctaagctggaaagcgagttcgtgtacggcgactacaaggtgtacgacgtgcggaagatgatcgccaagagcgagcaggaaatcggcaaggctaccgccaagtacttcttctacagcaacatcatgaactttttcaagaccgagattaccctggccaacggcgagatccggaagcggcctctgatcgagacaaacggcgaaacaggcgagatcgtgtgggataagggccgggactttgccaccgtgcggaaagtgctgtctatgccccaagtgaatatcgtgaaaaagaccgaggtgcagacaggcggcttcagcaaagagtctatcctgcccaagaggaacagcgacaagctgatcgccagaaagaaggactgggaccctaagaagtacggcggcttcgacagccccaccgtggcctattctgtgctggtggtggccaaagtggaaaagggcaagtccaagaaactgaagagtgtgaaagagctgctggggatcaccatcatggaaagaagcagcttcgagaagaatcccatcgactttctggaagccaagggctacaaagaagtgaaaaaggacctgatcatcaagctgcctaagtactccctgttcgagctggaaaacggccggaagagaatgctggcctctgccggcgaactgcagaagggaaacgaactggccctgccctccaaatatgtgaacttcctgtacctggccagccactatgagaagctgaagggctcccccgaggataatgagcagaaacagctgtttgtggaacagcacaaacactacctggacgagatcatcgagcagatcagcgagttctccaagagagtgatcctggccgacgctaatctggacaaggtgctgagcgcctacaacaagcacagagacaagcctatcagagagcaggccgagaatatcatccacctgtttaccctgaccaatctgggagcccctgccgccttcaagtactttgacaccaccatcgaccggaagaggtacaccagcaccaaagaggtgctggacgccaccctgatccaccagagcatcaccggcctgtacgagacacggatcgacctgtctcagctgggaggcgacgcctatccctatgacgtgcccgattatgccagcctgggcagcggctcccccaagaaaaaacgcaaggtggaagatcctaagaaaaagcggaaagtggacggcctcgagtaatgagatcccaagcacgcagcaatgcagctcaaaacgcttagcctagccacacccccacgggaaacagcagtgattaacctttagcaataaacgaaagtttaactaagctatactaaccccagggttggtcaatttcgtgccagccacaccctggtactgcatgcacgcaatgctagctgcccctttcccgtcctgggcaccccgagtctcccccgaccccgggtcccaggtatgctcccacctccacctgccccactcaccacctctgctagttccagacacctccgagacgagg

SEQ ID NO: 272 - RNA, 6843 nt, synthetic construct
  misc_feature 1..6843: note = V20 mRNA
  source 1..6843: mol_type = other RNA
aggactcactatttgttttcgcgcccagttgcaaaaagtgtcgacatttgcttctgacacaactgtgttcactagcaacctcaaacagacaccttaattaatctagaaccggtccagccaccatgaaccatgaccaggaatttgaccccccaaaggtttacccacctgtgccagctgagaagaggaagcccatccgcgtgctgtctctctttgatgggattgctacagggctcctggtgctgaaggacctgggcatccaagtggaccgctacattgcctccgaggtgtgtgaggactccatcacggtgggcatggtgcggcaccagggaaagatcatgtacgtcggggacgtccgcagcgtcacacagaagcatatccaggagtggggcccattcgacctggtgattggaggcagtccctgcaatgacctctccattgtcaaccctgcccgcaagggactttatgagggtactggccgcctcttctttgagttctaccgcctcctgcatgatgcgcggcccaaggagggagatgatcgccccttcttctggctctttgagaatgtggtggccatgggcgttagtgacaagagggacatctcgcgatttcttgagtctaaccccgtgatgattgacgccaaagaagtgtctgctgcacacagggcccgttacttctggggtaaccttcctggcatgaacaggcctttggcatccactgtgaatgataagctggagctgcaagagtgtctggagcacggcagaatagccaagttcagcaaagtgaggaccattaccaccaggtcaaactctataaagcagggcaaagaccagcatttccccgtcttcatgaacgagaaggaggacatcctgtggtgcactgaaatggaaagggtgtttggcttccccgtccactacacagacgtctccaacatgagccgcttggcgaggcagagactgctgggccgatcgtggagcgtgccggtcatccgccacctcttcgctccgctgaaggaatattttgcttgtgtgtctagcggcaatagtaacgctaacagccgcgggccgagcttcagcagcggcctggtgccgttaagcttgcgcggcagccatatgttcgaaaccgtgcctgtgtggaggagacagccagtccgggtgctgtccctttttgaagacatcaagaaagagctgacgagtttgggctttttggaaagtggttctgacccgggacaactgaagcatgtggttgatgtcacagacacagtgaggaaggatgtggaggagtggggacccttcgatcttgtgtacggcgccacacctcccctgggccacacctgtgaccgtcctcccagctggtacctgttccagttccaccggctcctgcagtacgcacggcccaagccaggcagccccaggcccttcttctggatgttcgtggacaatctggtgctgaacaaggaagacctggacgtcgcatctcgcttcctggagatggagccagtcaccatcccagatgtccacggcggatccttgcagaatgctgtccgcgtgtggagcaacatcccagccataaggagcagcaggcactgggctctggtttcggaagaagaattgtccctgctggcccagaacaagcagagctcgaagctcgcggccaagtggcccaccaagctggtgaagaactgctttctccccctaagagaatatttcaagtatttttcagacggcagcggcagcgagacccccggtaccagcgagagcgccacccccgagagcatgaacaattcccagggaagagtgaccttcgaggatgtcactgtgaacttcacccagggggagtggcagcggctgaatcccgaacagagaaacttgtacagggatgtgatgctggagaattacagcaaccttgtctctgtgggacaaggggaaaccaccaaacccgatgtgatcttgaggttggaacaaggaaaggagccatggttggaggaagaggaagtgctgggaagtggccgtgcagaaaaaaatggggacattggagggcagatttggaagccaaaggatgtgaaagagagtctcggagggccgagctctggcgcacccccaccaagtggagggtctcctgccgggtccccaacatctactgaagaaggcaccagcgaatccgcaacgcccgagtcaggccctggtacctccacagaaccatctgaaggtagtgcgcctggttccccagctggaagccctacttccaccgaagaaggcacgtcaaccgaaccaagtgaaggatctgcccctgggaccagcactgaaccatctgagccaaaaaagaagagaaaggtaatggacaagaagtacagcatcggcctggccatcggcaccaactctgtgggctgggccgtgatcaccgacgagtacaaggtgcccagcaagaaattcaaggtgctgggcaacaccgaccggcacagcatcaagaagaacctgatcggcgccctgctgttcgacagcggagaaacagccgaggccacccggctgaagagaaccgccagaagaagatacaccagacggaagaaccggatctgctatctgcaagagatcttcagcaacgagatggccaaggtggacgacagcttcttccacagactggaagagtccttcctggtggaagaggataagaagcacgagcggcaccccatcttcggcaacatcgtggacgaggtggcctaccacgagaagtaccccaccatctaccacctgagaaagaaactggtggacagcaccgacaaggccgacctgcggctgatctatctggccctggcccacatgatcaagttccggggccacttcctgatcgagggcgacctgaaccccgacaacagcgacgtggacaagctgttcatccagctggtgcagacctacaaccagctgttcgaggaaaaccccatcaacgccagcggcgtggacgccaaggccatcctgtctgccagactgagcaagagcagacggctggaaaatctgatcgcccagctgcccggcgagaagaagaatggcctgttcggcaacctgattgccctgagcctgggcctgacccccaacttcaagagcaacttcgacctggccgaggatgccaaactgcagctgagcaaggacacctacgacgacgacctggacaacctgctggcccagatcggcgaccagtacgccgacctgtttctggccgccaagaacctgtccgacgccatcctgctgagcgacatcctgagagtgaacaccgagatcaccaaggcccccctgagcgcctctatgatcaagagatacgacgagcaccaccaggacctgaccctgctgaaagctctcgtgcggcagcagctgcctgagaagtacaaagagattttcttcgaccagagcaagaacggctacgccggctacatcgatggcggagccagccaggaagagttctacaagttcatcaagcccatcctggaaaagatggacggcaccgaggaactgctcgtgaagctgaacagagaggacctgctgcggaagcagcggaccttcgacaacggcagcatcccccaccagatccacctgggagagctgcacgccattctgcggcggcaggaagatttttacccattcctgaaggacaaccgggaaaagatcgagaagatcctgaccttccgcatcccctactacgtgggccctctggccaggggaaacagcagattcgcctggatgaccagaaagagcgaggaaaccatcaccccctggaacttcgaggaagtggtggacaagggcgccagcgcccagagcttcatcgagcggatgaccaacttcgataagaacctgcccaacgagaaggtgctgcccaagcacagcctgctgtacgagtacttcaccgtgtacaacgagctgaccaaagtgaaatacgtgaccgagggaatgagaaagcccgccttcctgagcggcgagcagaaaaaagccatcgtggacctgctgttcaagaccaaccggaaagtgaccgtgaagcagctgaaagaggactacttcaagaaaatcgagtgcttcgactccgtggaaatctccggcgtggaagatcggttcaacgcctccctgggcacataccacgatctgctgaaaattatcaaggacaaggacttcctggacaatgaggaaaacgaggacattctggaagatatcgtgctgaccctgacactgtttgaggacagagagatgatcgaggaacggctgaaaacctatgcccacctgttcgacgacaaagtgatgaagcagctgaagcggcggagatacaccggctggggcaggctgagccggaagctgatcaacggcatccgggacaagcagtccggcaagacaatcctggatttcctgaagtccgacggcttcgccaacagaaacttcatgcagctgatccacgacgacagcctgacctttaaagaggacatccagaaagcccaggtgtccggccagggcgatagcctgcacgagcacattgccaatctggccggcagccccgccattaagaagggcatcctgcagacagtgaaggtggtggacgagctcgtgaaagtgatgggccggcacaagcccgagaacatcgtgatcgaaatggccagagagaaccagaccacccagaagggacagaagaacagccgcgagagaatgaagcggatcgaagagggcatcaaagagctgggcagccagatcctgaaagaacaccccgtggaaaacacccagctgcagaacgagaagctgtacctgtactacctgcagaatgggcgggatatgtacgtggaccaggaactggacatcaaccggctgtccgactacgatgtggacgctatcgtgcctcagagctttctgaaggacgactccatcgataacaaagtgctgactcggagcgacaagaaccggggcaagagcgacaacgtgccctccgaagaggtcgtgaagaagatgaagaactactggcgccagctgctgaatgccaagctgattacccagaggaagttcgacaatctgaccaaggccgagagaggcggcctgagcgaactggataaggccggcttcatcaagagacagctggtggaaacccggcagatcacaaagcacgtggcacagatcctggactcccggatgaacactaagtacgacgagaacgacaaactgatccgggaagtgaaagtgatcaccctgaagtccaagctggtgtccgatttccggaaggatttccagttttacaaagtgcgcgagatcaacaactaccaccacgcccacgacgcctacctgaacgccgtcgtgggaaccgccctgatcaaaaagtaccctaagctggaaagcgagttcgtgtacggcgactacaaggtgtacgacgtgcggaagatgatcgccaagagcgagcaggaaatcggcaaggctaccgccaagtacttcttctacagcaacatcatgaactttttcaagaccgagattaccctggccaacggcgagatccggaagcggcctctgatcgagacaaacggcgaaacaggcgagatcgtgtgggataagggccgggactttgccaccgtgcggaaagtgctgtctatgccccaagtgaatatcgtgaaaaagaccgaggtgcagacaggcggcttcagcaaagagtctatcctgcccaagaggaacagcgacaagctgatcgccagaaagaaggactgggaccctaagaagtacggcggcttcgacagccccaccgtggcctattctgtgctggtggtggccaaagtggaaaagggcaagtccaagaaactgaagagtgtgaaagagctgctggggatcaccatcatggaaagaagcagcttcgagaagaatcccatcgactttctggaagccaagggctacaaagaagtgaaaaaggacctgatcatcaagctgcctaagtactccctgttcgagctggaaaacggccggaagagaatgctggcctctgccggcgaactgcagaagggaaacgaactggccctgccctccaaatatgtgaacttcctgtacctggccagccactatgagaagctgaagggctcccccgaggataatgagcagaaacagctgtttgtggaacagcacaaacactacctggacgagatcatcgagcagatcagcgagttctccaagagagtgatcctggccgacgctaatctggacaaggtgctgagcgcctacaacaagcacagagacaagcctatcagagagcaggccgagaatatcatccacctgtttaccctgaccaatctgggagcccctgccgccttcaagtactttgacaccaccatcgaccggaagaggtacaccagcaccaaagaggtgctggacgccaccctgatccaccagagcatcaccggcctgtacgagacacggatcgacctgtctcagctgggaggcgacgcctatccctatgacgtgcccgattatgccagcctgggcagcggctcccccaagaaaaaacgcaaggtggaagatcctaagaaaaagcggaaagtggacggcctcgagtaatgagatcccaagcacgcagcaatgcagctcaaaacgcttagcctagccacacccccacgggaaacagcagtgattaacctttagcaataaacgaaagtttaactaagctatactaaccccagggttggtcaatttcgtgccagccacaccctggtactgcatgcacgcaatgctagctgcccctttcccgtcctgggcaccccgagtctcccccgaccccgggtcccaggtatgctcccacctccacctgccccactcaccacctctgctagttccagacacctccgagacgagg

SEQ ID NO: 273 - RNA, 6822 nt, synthetic construct
  misc_feature 1..6822: note = V21 mRNA
  source 1..6822: mol_type = other RNA
aggactcactatttgttttcgcgcccagttgcaaaaagtgtcgacatttgcttctgacacaactgtgttcactagcaacctcaaacagacaccttaattaagccaccatgaacaattcccagggaagagtgaccttcgaggatgtcactgtgaacttcacccagggggagtggcagcggctgaatcccgaacagagaaacttgtacagggatgtgatgctggagaattacagcaaccttgtctctgtgggacaaggggaaaccaccaaacccgatgtgatcttgaggttggaacaaggaaaggagccatggttggaggaagaggaagtgctgggaagtggccgtgcagaaaaaaatggggacattggagggcagatttggaagccaaaggatgtgaaagagagtctcagcggcagcgagacccccggtaccagcgagagcgccacccccgagagcatgaaccatgaccaggaatttgaccccccaaaggtttacccacctgtgccagctgagaagaggaagcccatccgcgtgctgtctctctttgatgggattgctacagggctcctggtgctgaaggacctgggcatccaagtggaccgctacattgcctccgaggtgtgtgaggactccatcacggtgggcatggtgcggcaccagggaaagatcatgtacgtcggggacgtccgcagcgtcacacagaagcatatccaggagtggggcccattcgacctggtgattggaggcagtccctgcaatgacctctccattgtcaaccctgcccgcaagggactttatgagggtactggccgcctcttctttgagttctaccgcctcctgcatgatgcgcggcccaaggagggagatgatcgccccttcttctggctctttgagaatgtggtggccatgggcgttagtgacaagagggacatctcgcgatttcttgagtctaaccccgtgatgattgacgccaaagaagtgtctgctgcacacagggcccgttacttctggggtaaccttcctggcatgaacaggcctttggcatccactgtgaatgataagctggagctgcaagagtgtctggagcacggcagaatagccaagttcagcaaagtgaggaccattaccaccaggtcaaactctataaagcagggcaaagaccagcatttccccgtcttcatgaacgagaaggaggacatcctgtggtgcactgaaatggaaagggtgtttggcttccccgtccactacacagacgtctccaacatgagccgcttggcgaggcagagactgctgggccgatcgtggagcgtgccggtcatccgccacctcttcgctccgctgaaggaatattttgcttgtgtgtctagcggcaatagtaacgctaacagccgcgggccgagcttcagcagcggcctggtgccgttaagcttgcgcggcagccatatgttcgaaaccgtgcctgtgtggaggagacagccagtccgggtgctgtccctttttgaagacatcaagaaagagctgacgagtttgggctttttggaaagtggttctgacccgggacaactgaagcatgtggttgatgtcacagacacagtgaggaaggatgtggaggagtggggacccttcgatcttgtgtacggcgccacacctcccctgggccacacctgtgaccgtcctcccagctggtacctgttccagttccaccggctcctgcagtacgcacggcccaagccaggcagccccaggcccttcttctggatgttcgtggacaatctggtgctgaacaaggaagacctggacgtcgcatctcgcttcctggagatggagccagtcaccatcccagatgtccacggcggatccttgcagaatgctgtccgcgtgtggagcaacatcccagccataaggagcagcaggcactgggctctggtttcggaagaagaattgtccctgctggcccagaacaagcagagctcgaagctcgcggccaagtggcccaccaagctggtgaagaactgctttctccccctaagagaatatttcaagtatttttcaggagggccgagctctggcgcacccccaccaagtggagggtctcctgccgggtccccaacatctactgaagaaggcaccagcgaatccgcaacgcccgagtcaggccctggtacctccacagaaccatctgaaggtagtgcgcctggttccccagctggaagccctacttccaccgaagaaggcacgtcaaccgaaccaagtgaaggatctgcccctgggaccagcactgaaccatctgagccaaaaaagaagagaaaggtaatggacaagaagtacagcatcggcctggccatcggcaccaactctgtgggctgggccgtgatcaccgacgagtacaaggtgcccagcaagaaattcaaggtgctgggcaacaccgaccggcacagcatcaagaagaacctgatcggcgccctgctgttcgacagcggagaaacagccgaggccacccggctgaagagaaccgccagaagaagatacaccagacggaagaaccggatctgctatctgcaagagatcttcagcaacgagatggccaaggtggacgacagcttcttccacagactggaagagtccttcctggtggaagaggataagaagcacgagcggcaccccatcttcggcaacatcgtggacgaggtggcctaccacgagaagtaccccaccatctaccacctgagaaagaaactggtggacagcaccgacaaggccgacctgcggctgatctatctggccctggcccacatgatcaagttccggggccacttcctgatcgagggcgacctgaaccccgacaacagcgacgtggacaagctgttcatccagctggtgcagacctacaaccagctgttcgaggaaaaccccatcaacgccagcggcgtggacgccaaggccatcctgtctgccagactgagcaagagcagacggctggaaaatctgatcgcccagctgcccggcgagaagaagaatggcctgttcggcaacctgattgccctgagcctgggcctgacccccaacttcaagagcaacttcgacctggccgaggatgccaaactgcagctgagcaaggacacctacgacgacgacctggacaacctgctggcccagatcggcgaccagtacgccgacctgtttctggccgccaagaacctgtccgacgccatcctgctgagcgacatcctgagagtgaacaccgagatcaccaaggcccccctgagcgcctctatgatcaagagatacgacgagcaccaccaggacctgaccctgctgaaagctctcgtgcggcagcagctgcctgagaagtacaaagagattttcttcgaccagagcaagaacggctacgccggctacatcgatggcggagccagccaggaagagttctacaagttcatcaagcccatcctggaaaagatggacggcaccgaggaactgctcgtgaagctgaacagagaggacctgctgcggaagcagcggaccttcgacaacggcagcatcccccaccagatccacctgggagagctgcacgccattctgcggcggcaggaagatttttacccattcctgaaggacaaccgggaaaagatcgagaagatcctgaccttccgcatcccctactacgtgggccctctggccaggggaaacagcagattcgcctggatgaccagaaagagcgaggaaaccatcaccccctggaacttcgaggaagtggtggacaagggcgccagcgcccagagcttcatcgagcggatgaccaacttcgataagaacctgcccaacgagaaggtgctgcccaagcacagcctgctgtacgagtacttcaccgtgtacaacgagctgaccaaagtgaaatacgtgaccgagggaatgagaaagcccgccttcctgagcggcgagcagaaaaaagccatcgtggacctgctgttcaagaccaaccggaaagtgaccgtgaagcagctgaaagaggactacttcaagaaaatcgagtgcttcgactccgtggaaatctccggcgtggaagatcggttcaacgcctccctgggcacataccacgatctgctgaaaattatcaaggacaaggacttcctggacaatgaggaaaacgaggacattctggaagatatcgtgctgaccctgacactgtttgaggacagagagatgatcgaggaacggctgaaaacctatgcccacctgttcgacgacaaagtgatgaagcagctgaagcggcggagatacaccggctggggcaggctgagccggaagctgatcaacggcatccgggacaagcagtccggcaagacaatcctggatttcctgaagtccgacggcttcgccaacagaaacttcatgcagctgatccacgacgacagcctgacctttaaagaggacatccagaaagcccaggtgtccggccagggcgatagcctgcacgagcacattgccaatctggccggcagccccgccattaagaagggcatcctgcagacagtgaaggtggtggacgagctcgtgaaagtgatgggccggcacaagcccgagaacatcgtgatcgaaatggccagagagaaccagaccacccagaagggacagaagaacagccgcgagagaatgaagcggatcgaagagggcatcaaagagctgggcagccagatcctgaaagaacaccccgtggaaaacacccagctgcagaacgagaagctgtacctgtactacctgcagaatgggcgggatatgtacgtggaccaggaactggacatcaaccggctgtccgactacgatgtggacgctatcgtgcctcagagctttctgaaggacgactccatcgataacaaagtgctgactcggagcgacaagaaccggggcaagagcgacaacgtgccctccgaagaggtcgtgaagaagatgaagaactactggcgccagctgctgaatgccaagctgattacccagaggaagttcgacaatctgaccaaggccgagagaggcggcctgagcgaactggataaggccggcttcatcaagagacagctggtggaaacccggcagatcacaaagcacgtggcacagatcctggactcccggatgaacactaagtacgacgagaacgacaaactgatccgggaagtgaaagtgatcaccctgaagtccaagctggtgtccgatttccggaaggatttccagttttacaaagtgcgcgagatcaacaactaccaccacgcccacgacgcctacctgaacgccgtcgtgggaaccgccctgatcaaaaagtaccctaagctggaaagcgagttcgtgtacggcgactacaaggtgtacgacgtgcggaagatgatcgccaagagcgagcaggaaatcggcaaggctaccgccaagtacttcttctacagcaacatcatgaactttttcaagaccgagattaccctggccaacggcgagatccggaagcggcctctgatcgagacaaacggcgaaacaggcgagatcgtgtgggataagggccgggactttgccaccgtgcggaaagtgctgtctatgccccaagtgaatatcgtgaaaaagaccgaggtgcagacaggcggcttcagcaaagagtctatcctgcccaagaggaacagcgacaagctgatcgccagaaagaaggactgggaccctaagaagtacggcggcttcgacagccccaccgtggcctattctgtgctggtggtggccaaagtggaaaagggcaagtccaagaaactgaagagtgtgaaagagctgctggggatcaccatcatggaaagaagcagcttcgagaagaatcccatcgactttctggaagccaagggctacaaagaagtgaaaaaggacctgatcatcaagctgcctaagtactccctgttcgagctggaaaacggccggaagagaatgctggcctctgccggcgaactgcagaagggaaacgaactggccctgccctccaaatatgtgaacttcctgtacctggccagccactatgagaagctgaagggctcccccgaggataatgagcagaaacagctgtttgtggaacagcacaaacactacctggacgagatcatcgagcagatcagcgagttctccaagagagtgatcctggccgacgctaatctggacaaggtgctgagcgcctacaacaagcacagagacaagcctatcagagagcaggccgagaatatcatccacctgtttaccctgaccaatctgggagcccctgccgccttcaagtactttgacaccaccatcgaccggaagaggtacaccagcaccaaagaggtgctggacgccaccctgatccaccagagcatcaccggcctgtacgagacacggatcgacctgtctcagctgggaggcgacgcctatccctatgacgtgcccgattatgccagcctgggcagcggctcccccaagaaaaaacgcaaggtggaagatcctaagaaaaagcggaaagtggacggcctcgagtaatgagatcccaagcacgcagcaatgcagctcaaaacgcttagcctagccacacccccacgggaaacagcagtgattaacctttagcaataaacgaaagtttaactaagctatactaaccccagggttggtcaatttcgtgccagccacaccctggtactgcatgcacgcaatgctagctgcccctttcccgtcctgggcaccccgagtctcccccgaccccgggtcccaggtatgctcccacctccacctgccccactcaccacctctgctagttccagacacctccgagacgagg

SEQ ID NO: 274 - RNA, 6747 nt, synthetic construct
  misc_feature 1..6747: note = V22 mRNA
  source 1..6747: mol_type = other RNA
aggactcactatttgttttcgcgcccagttgcaaaaagtgtcgacatttgcttctgacacaactgtgttcactagcaacctcaaacagacaccttaattaagccaccatgcggacactggtgaccttcaaggatgtatttgtggacttcaccagggaggagtggaagctgctggacactgctcagcagatcgtgtacagaaatgtgatgctggagaactataagaacctggtttccttgggttatcagcttactaagccagatgtgatcctccggttggagaagggagaagagcccagcggcagcgagacccccggtaccagcgagagcgccacccccgagagcatgaaccatgaccaggaatttgaccccccaaaggtttacccacctgtgccagctgagaagaggaagcccatccgcgtgctgtctctctttgatgggattgctacagggctcctggtgctgaaggacctgggcatccaagtggaccgctacattgcctccgaggtgtgtgaggactccatcacggtgggcatggtgcggcaccagggaaagatcatgtacgtcggggacgtccgcagcgtcacacagaagcatatccaggagtggggcccattcgacctggtgattggaggcagtccctgcaatgacctctccattgtcaaccctgcccgcaagggactttatgagggtactggccgcctcttctttgagttctaccgcctcctgcatgatgcgcggcccaaggagggagatgatcgccccttcttctggctctttgagaatgtggtggccatgggcgttagtgacaagagggacatctcgcgatttcttgagtctaaccccgtgatgattgacgccaaagaagtgtctgctgcacacagggcccgttacttctggggtaaccttcctggcatgaacaggcctttggcatccactgtgaatgataagctggagctgcaagagtgtctggagcacggcagaatagccaagttcagcaaagtgaggaccattaccaccaggtcaaactctataaagcagggcaaagaccagcatttccccgtcttcatgaacgagaaggaggacatcctgtggtgcactgaaatggaaagggtgtttggcttccccgtccactacacagacgtctccaacatgagccgcttggcgaggcagagactgctgggccgatcgtggagcgtgccggtcatccgccacctcttcgctccgctgaaggaatattttgcttgtgtgtctagcggcaatagtaacgctaacagccgcgggccgagcttcagcagcggcctggtgccgttaagcttgcgcggcagccatatgggccctatggagatatacaagacagtgtctgcatggaagagacagccagtgcgggtactgagcctcttcagaaacatcgacaaggtactaaagagtttgggcttcttggaaagcggttctggttctgggggaggaacgctgaagtacgtggaagatgtcacaaatgtcgtgaggagagacgtggagaaatggggcccctttgacctggtgtacggctcgacgcagcccctaggcagctcttgtgatcgctgtcccggctggtacatgttccagttccaccggatcctgcagtatgcgctgcctcgccaggagagtcagcggcccttcttctggatattcatggacaatctgctgctgactgaggatgaccaagagacaactacccgcttccttcagacagaggctgtgaccctccaggatgtccgtggcagagactaccagaatgctatgcgggtgtggagcaacattccagggctgaagagcaagcatgcgcccctgaccccaaaggaagaagagtatctgcaagcccaagtcagaagcaggagcaagctggacgccccgaaagttgacctcctggtgaagaactgccttctcccgctgagagagtacttcaagtatttttctcaaaactcacttcctcttggagggccgagctctggcgcacccccaccaagtggagggtctcctgccgggtccccaacatctactgaagaaggcaccagcgaatccgcaacgcccgagtcaggccctggtacctccacagaaccatctgaaggtagtgcgcctggttccccagctggaagccctacttccaccgaagaaggcacgtcaaccgaaccaagtgaaggatctgcccctgggaccagcactgaaccatctgagccaaaaaagaagagaaaggtaatggacaagaagtacagcatcggcctggccatcggcaccaactctgtgggctgggccgtgatcaccgacgagtacaaggtgcccagcaagaaattcaaggtgctgggcaacaccgaccggcacagcatcaagaagaacctgatcggcgccctgctgttcgacagcggagaaacagccgaggccacccggctgaagagaaccgccagaagaagatacaccagacggaagaaccggatctgctatctgcaagagatcttcagcaacgagatggccaaggtggacgacagcttcttccacagactggaagagtccttcctggtggaagaggataagaagcacgagcggcaccccatcttcggcaacatcgtggacgaggtggcctaccacgagaagtaccccaccatctaccacctgagaaagaaactggtggacagcaccgacaaggccgacctgcggctgatctatctggccctggcccacatgatcaagttccggggccacttcctgatcgagggcgacctgaaccccgacaacagcgacgtggacaagctgttcatccagctggtgcagacctacaaccagctgttcgaggaaaaccccatcaacgccagcggcgtggacgccaaggccatcctgtctgccagactgagcaagagcagacggctggaaaatctgatcgcccagctgcccggcgagaagaagaatggcctgttcggcaacctgattgccctgagcctgggcctgacccccaacttcaagagcaacttcgacctggccgaggatgccaaactgcagctgagcaaggacacctacgacgacgacctggacaacctgctggcccagatcggcgaccagtacgccgacctgtttctggccgccaagaacctgtccgacgccatcctgctgagcgacatcctgagagtgaacaccgagatcaccaaggcccccctgagcgcctctatgatcaagagatacgacgagcaccaccaggacctgaccctgctgaaagctctcgtgcggcagcagctgcctgagaagtacaaagagattttcttcgaccagagcaagaacggctacgccggctacatcgatggcggagccagccaggaagagttctacaagttcatcaagcccatcctggaaaagatggacggcaccgaggaactgctcgtgaagctgaacagagaggacctgctgcggaagcagcggaccttcgacaacggcagcatcccccaccagatccacctgggagagctgcacgccattctgcggcggcaggaagatttttacccattcctgaaggacaaccgggaaaagatcgagaagatcctgaccttccgcatcccctactacgtgggccctctggccaggggaaacagcagattcgcctggatgaccagaaagagcgaggaaaccatcaccccctggaacttcgaggaagtggtggacaagggcgccagcgcccagagcttcatcgagcggatgaccaacttcgataagaacctgcccaacgagaaggtgctgcccaagcacagcctgctgtacgagtacttcaccgtgtacaacgagctgaccaaagtgaaatacgtgaccgagggaatgagaaagcccgccttcctgagcggcgagcagaaaaaagccatcgtggacctgctgttcaagaccaaccggaaagtgaccgtgaagcagctgaaagaggactacttcaagaaaatcgagtgcttcgactccgtggaaatctccggcgtggaagatcggttcaacgcctccctgggcacataccacgatctgctgaaaattatcaaggacaaggacttcctggacaatgaggaaaacgaggacattctggaagatatcgtgctgaccctgacactgtttgaggacagagagatgatcgaggaacggctgaaaacctatgcccacctgttcgacgacaaagtgatgaagcagctgaagcggcggagatacaccggctggggcaggctgagccggaagctgatcaacggcatccgggacaagcagtccggcaagacaatcctggatttcctgaagtccgacggcttcgccaacagaaacttcatgcagctgatccacgacgacagcctgacctttaaagaggacatccagaaagcccaggtgtccggccagggcgatagcctgcacgagcacattgccaatctggccggcagccccgccattaagaagggcatcctgcagacagtgaaggtggtggacgagctcgtgaaagtgatgggccggcacaagcccgagaacatcgtgatcgaaatggccagagagaaccagaccacccagaagggacagaagaacagccgcgagagaatgaagcggatcgaagagggcatcaaagagctgggcagccagatcctgaaagaacaccccgtggaaaacacccagctgcagaacgagaagctgtacctgtactacctgcagaatgggcgggatatgtacgtggaccaggaactggacatcaaccggctgtccgactacgatgtggacgctatcgtgcctcagagctttctgaaggacgactccatcgataacaaagtgctgactcggagcgacaagaaccggggcaagagcgacaacgtgccctccgaagaggtcgtgaagaagatgaagaactactggcgccagctgctgaatgccaagctgattacccagaggaagttcgacaatctgaccaaggccgagagaggcggcctgagcgaactggataaggccggcttcatcaagagacagctggtggaaacccggcagatcacaaagcacgtggcacagatcctggactcccggatgaacactaagtacgacgagaacgacaaactgatccgggaagtgaaagtgatcaccctgaagtccaagctggtgtccgatttccggaaggatttccagttttacaaagtgcgcgagatcaacaactaccaccacgcccacgacgcctacctgaacgccgtcgtgggaaccgccctgatcaaaaagtaccctaagctggaaagcgagttcgtgtacggcgactacaaggtgtacgacgtgcggaagatgatcgccaagagcgagcaggaaatcggcaaggctaccgccaagtacttcttctacagcaacatcatgaactttttcaagaccgagattaccctggccaacggcgagatccggaagcggcctctgatcgagacaaacggcgaaacaggcgagatcgtgtgggataagggccgggactttgccaccgtgcggaaagtgctgtctatgccccaagtgaatatcgtgaaaaagaccgaggtgcagacaggcggcttcagcaaagagtctatcctgcccaagaggaacagcgacaagctgatcgccagaaagaaggactgggaccctaagaagtacggcggcttcgacagccccaccgtggcctattctgtgctggtggtggccaaagtggaaaagggcaagtccaagaaactgaagagtgtgaaagagctgctggggatcaccatcatggaaagaagcagcttcgagaagaatcccatcgactttctggaagccaagggctacaaagaagtgaaaaaggacctgatcatcaagctgcctaagtactccctgttcgagctggaaaacggccggaagagaatgctggcctctgccggcgaactgcagaagggaaacgaactggccctgccctccaaatatgtgaacttcctgtacctggccagccactatgagaagctgaagggctcccccgaggataatgagcagaaacagctgtttgtggaacagcacaaacactacctggacgagatcatcgagcagatcagcgagttctccaagagagtgatcctggccgacgctaatctggacaaggtgctgagcgcctacaacaagcacagagacaagcctatcagagagcaggccgagaatatcatccacctgtttaccctgaccaatctgggagcccctgccgccttcaagtactttgacaccaccatcgaccggaagaggtacaccagcaccaaagaggtgctggacgccaccctgatccaccagagcatcaccggcctgtacgagacacggatcgacctgtctcagctgggaggcgacgcctatccctatgacgtgcccgattatgccagcctgggcagcggctcccccaagaaaaaacgcaaggtggaagatcctaagaaaaagcggaaagtggacggcctcgagtaatgagatcccaagcacgcagcaatgcagctcaaaacgcttagcctagccacacccccacgggaaacagcagtgattaacctttagcaataaacgaaagtttaactaagctatactaaccccagggttggtcaatttcgtgccagccacaccctggtactgcatgcacgcaatgctagctgcccctttcccgtcctgggcaccccgagtctcccccgaccccgggtcccaggtatgctcccacctccacctgccccactcaccacctctgctagttccagacacctccgagacgagg

SEQ ID NO: 275 - RNA, 6874 nt, synthetic construct
  misc_feature 1..6874: note = V23 mRNA
  source 1..6874: mol_type = other RNA
aggactcactatttgttttcgcgcccagttgcaaaaagtgtcgacatttgcttctgacacaactgtgttcactagcaacctcaaacagacaccgccaccatggtccctgctgctaagagagtgaaactggatggatccgacaagaagtacagcatcggcctggccatcggcaccaactctgtgggctgggccgtgatcaccgacgagtacaaggtgcccagcaagaaattcaaggtgctgggcaacaccgaccggcacagcatcaagaagaacctgatcggcgccctgctgttcgacagcggagaaacagccgaggccacccggctgaagagaaccgccagaagaagatacaccagacggaagaaccggatctgctatctgcaagagatcttcagcaacgagatggccaaggtggacgacagcttcttccacagactggaagagtccttcctggtggaagaggataagaagcacgagcggcaccccatcttcggcaacatcgtggacgaggtggcctaccacgagaagtaccccaccatctaccacctgagaaagaaactggtggacagcaccgacaaggccgacctgcggctgatctatctggccctggcccacatgatcaagttccggggccacttcctgatcgagggcgacctgaaccccgacaacagcgacgtggacaagctgttcatccagctggtgcagacctacaaccagctgttcgaggaaaaccccatcaacgccagcggcgtggacgccaaggccatcctgtctgccagactgagcaagagcagacggctggaaaatctgatcgcccagctgcccggcgagaagaagaatggcctgttcggcaacctgattgccctgagcctgggcctgacccccaacttcaagagcaacttcgacctggccgaggatgccaaactgcagctgagcaaggacacctacgacgacgacctggacaacctgctggcccagatcggcgaccagtacgccgacctgtttctggccgccaagaacctgtccgacgccatcctgctgagcgacatcctgagagtgaacaccgagatcaccaaggcccccctgagcgcctctatgatcaagagatacgacgagcaccaccaggacctgaccctgctgaaagctctcgtgcggcagcagctgcctgagaagtacaaagagattttcttcgaccagagcaagaacggctacgccggctacatcgatggcggagccagccaggaagagttctacaagttcatcaagcccatcctggaaaagatggacggcaccgaggaactgctcgtgaagctgaacagagaggacctgctgcggaagcagcggaccttcgacaacggcagcatcccccaccagatccacctgggagagctgcacgccattctgcggcggcaggaagatttttacccattcctgaaggacaaccgggaaaagatcgagaagatcctgaccttccgcatcccctactacgtgggccctctggccaggggaaacagcagattcgcctggatgaccagaaagagcgaggaaaccatcaccccctggaacttcgaggaagtggtggacaagggcgccagcgcccagagcttcatcgagcggatgaccaacttcgataagaacctgcccaacgagaaggtgctgcccaagcacagcctgctgtacgagtacttcaccgtgtacaacgagctgaccaaagtgaaatacgtgaccgagggaatgagaaagcccgccttcctgagcggcgagcagaaaaaagccatcgtggacctgctgttcaagaccaaccggaaagtgaccgtgaagcagctgaaagaggactacttcaagaaaatcgagtgcttcgactccgtggaaatctccggcgtggaagatcggttcaacgcctccctgggcacataccacgatctgctgaaaattatcaaggacaaggacttcctggacaatgaggaaaacgaggacattctggaagatatcgtgctgaccctgacactgtttgaggacagagagatgatcgaggaacggctgaaaacctatgcccacctgttcgacgacaaagtgatgaagcagctgaagcggcggagatacaccggctggggcaggctgagccggaagctgatcaacggcatccgggacaagcagtccggcaagacaatcctggatttcctgaagtccgacggcttcgccaacagaaacttcatgcagctgatccacgacgacagcctgacctttaaagaggacatccagaaagcccaggtgtccggccagggcgatagcctgcacgagcacattgccaatctggccggcagccccgccattaagaagggcatcctgcagacagtgaaggtggtggacgagctcgtgaaagtgatgggccggcacaagcccgagaacatcgtgatcgaaatggccagagagaaccagaccacccagaagggacagaagaacagccgcgagagaatgaagcggatcgaagagggcatcaaagagctgggcagccagatcctgaaagaacaccccgtggaaaacacccagctgcagaacgagaagctgtacctgtactacctgcagaatgggcgggatatgtacgtggaccaggaactggacatcaaccggctgtccgactacgatgtggacgctatcgtgcctcagagctttctgaaggacgactccatcgataacaaagtgctgactcggagcgacaagaaccggggcaagagcgacaacgtgccctccgaagaggtcgtgaagaagatgaagaactactggcgccagctgctgaatgccaagctgattacccagaggaagttcgacaatctgaccaaggccgagagaggcggcctgagcgaactggataaggccggcttcatcaagagacagctggtggaaacccggcagatcacaaagcacgtggcacagatcctggactcccggatgaacactaagtacgacgagaacgacaaactgatccgggaagtgaaagtgatcaccctgaagtccaagctggtgtccgatttccggaaggatttccagttttacaaagtgcgcgagatcaacaactaccaccacgcccacgacgcctacctgaacgccgtcgtgggaaccgccctgatcaaaaagtaccctaagctggaaagcgagttcgtgtacggcgactacaaggtgtacgacgtgcggaagatgatcgccaagagcgagcaggaaatcggcaaggctaccgccaagtacttcttctacagcaacatcatgaactttttcaagaccgagattaccctggccaacggcgagatccggaagcggcctctgatcgagacaaacggcgaaacaggcgagatcgtgtgggataagggccgggactttgccaccgtgcggaaagtgctgtctatgccccaagtgaatatcgtgaaaaagaccgaggtgcagacaggcggcttcagcaaagagtctatcctgcccaagaggaacagcgacaagctgatcgccagaaagaaggactgggaccctaagaagtacggcggcttcgacagccccaccgtggcctattctgtgctggtggtggccaaagtggaaaagggcaagtccaagaaactgaagagtgtgaaagagctgctggggatcaccatcatggaaagaagcagcttcgagaagaatcccatcgactttctggaagccaagggctacaaagaagtgaaaaaggacctgatcatcaagctgcctaagtactccctgttcgagctggaaaacggccggaagagaatgctggcctctgccggcgaactgcagaagggaaacgaactggccctgccctccaaatatgtgaacttcctgtacctggccagccactatgagaagctgaagggctcccccgaggataatgagcagaaacagctgtttgtggaacagcacaaacactacctggacgagatcatcgagcagatcagcgagttctccaagagagtgatcctggccgacgctaatctggacaaggtgctgagcgcctacaacaagcacagagacaagcctatcagagagcaggccgagaatatcatccacctgtttaccctgaccaatctgggagcccctgccgccttcaagtactttgacaccaccatcgaccggaagaggtacaccagcaccaaagaggtgctggacgccaccctgatccaccagagcatcaccggcctgtacgagacacggatcgacctgtctcagctgggaggcgacgcctatccctatgacgtgcccgattatgccagcctgggcagcggctcccccaagaaaaaacgcaaggtggaagatcctaagaaaaagcggaaagtggacggcggagggccgagctctggcgcacccccaccaagtggagggtctcctgccgggtccccaacatctactgaagaaggcaccagcgaatccgcaacgcccgagtcaggccctggtacctccacagaaccatctgaaggtagtgcgcctggttccccagctggaagccctacttccaccgaagaaggcacgtcaaccgaaccaagtgaaggatctgcccctgggaccagcactgaaccatctgagatgggccctatggagatatacaagacagtgtctgcatggaagagacagccagtgcgggtactgagcctcttcagaaacatcgacaaggtactaaagagtttgggcttcttggaaagcggttctggttctgggggaggaacgctgaagtacgtggaagatgtcacaaatgtcgtgaggagagacgtggagaaatggggcccctttgacctggtgtacggctcgacgcagcccctaggcagctcttgtgatcgctgtcccggctggtacatgttccagttccaccggatcctgcagtatgcgctgcctcgccaggagagtcagcggcccttcttctggatattcatggacaatctgctgctgactgaggatgaccaagagacaactacccgcttccttcagacagaggctgtgaccctccaggatgtccgtggcagagactaccagaatgctatgcgggtgtggagcaacattccagggctgaagagcaagcatgcgcccctgaccccaaaggaagaagagtatctgcaagcccaagtcagaagcaggagcaagctggacgccccgaaagttgacctcctggtgaagaactgccttctcccgctgagagagtacttcaagtatttttctcaaaactcacttcctctttctagcggcaatagtaacgctaacagccgcgggccgagcttcagcagcggcctggtgccgttaagcttgcgcggcagccatatgaaccatgaccaggaatttgaccccccaaaggtttacccacctgtgccagctgagaagaggaagcccatccgcgtgctgtctctctttgatgggattgctacagggctcctggtgctgaaggacctgggcatccaagtggaccgctacattgcctccgaggtgtgtgaggactccatcacggtgggcatggtgcggcaccagggaaagatcatgtacgtcggggacgtccgcagcgtcacacagaagcatatccaggagtggggcccattcgacctggtgattggaggcagtccctgcaatgacctctccattgtcaaccctgcccgcaagggactttatgagggtactggccgcctcttctttgagttctaccgcctcctgcatgatgcgcggcccaaggagggagatgatcgccccttcttctggctctttgagaatgtggtggccatgggcgttagtgacaagagggacatctcgcgatttcttgagtctaaccccgtgatgattgacgccaaagaagtgtctgctgcacacagggcccgttacttctggggtaaccttcctggcatgaacaggcctttggcatccactgtgaatgataagctggagctgcaagagtgtctggagcacggcagaatagccaagttcagcaaagtgaggaccattaccaccaggtcaaactctataaagcagggcaaagaccagcatttccccgtcttcatgaacgagaaggaggacatcctgtggtgcactgaaatggaaagggtgtttggcttccccgtccactacacagacgtctccaacatgagccgcttggcgaggcagagactgctgggccgatcgtggagcgtgccggtcatccgccacctcttcgctccgctgaaggaatattttgcttgtgtggacggcagcggcagcgagacccccggtaccagcgagagcgccacccccgagagcatgaacaattcccagggaagagtgaccttcgaggatgtcactgtgaacttcacccagggggagtggcagcggctgaatcccgaacagagaaacttgtacagggatgtgatgctggagaattacagcaaccttgtctctgtgggacaaggggaaaccaccaaacccgatgtgatcttgaggttggaacaaggaaaggagccatggttggaggaagaggaagtgctgggaagtggccgtgcagaaaaaaatggggacattggagggcagatttggaagccaaaggatgtgaaagagagtctcctcgagtgataatagggatcccaagcacgcagcaatgcagctcaaaacgcttagcctagccacacccccacgggaaacagcagtgattaacctttagcaataaacgaaagtttaactaagctatactaaccccagggttggtcaatttcgtgccagccacaccctggtactgcatgcacgcaatgctagctgcccctttcccgtcctgggcaccccgagtctcccccgaccccgggtcccaggtatgctcccacctccacctgccccactcaccacctctgctagttccagacacctccgaagatgg

SEQ ID NO: 276 - RNA, 6747 nt, synthetic construct
  misc_feature 1..6747: note = V24 mRNA
  source 1..6747: mol_type = other RNA
aggactcactatttgttttcgcgcccagttgcaaaaagtgtcgacatttgcttctgacacaactgtgttcactagcaacctcaaacagacaccgccaccatggtccctgctgctaagagagtgaaactggatggatccgacaagaagtacagcatcggcctggccatcggcaccaactctgtgggctgggccgtgatcaccgacgagtacaaggtgcccagcaagaaattcaaggtgctgggcaacaccgaccggcacagcatcaagaagaacctgatcggcgccctgctgttcgacagcggagaaacagccgaggccacccggctgaagagaaccgccagaagaagatacaccagacggaagaaccggatctgctatctgcaagagatcttcagcaacgagatggccaaggtggacgacagcttcttccacagactggaagagtccttcctggtggaagaggataagaagcacgagcggcaccccatcttcggcaacatcgtggacgaggtggcctaccacgagaagtaccccaccatctaccacctgagaaagaaactggtggacagcaccgacaaggccgacctgcggctgatctatctggccctggcccacatgatcaagttccggggccacttcctgatcgagggcgacctgaaccccgacaacagcgacgtggacaagctgttcatccagctggtgcagacctacaaccagctgttcgaggaaaaccccatcaacgccagcggcgtggacgccaaggccatcctgtctgccagactgagcaagagcagacggctggaaaatctgatcgcccagctgcccggcgagaagaagaatggcctgttcggcaacctgattgccctgagcctgggcctgacccccaacttcaagagcaacttcgacctggccgaggatgccaaactgcagctgagcaaggacacctacgacgacgacctggacaacctgctggcccagatcggcgaccagtacgccgacctgtttctggccgccaagaacctgtccgacgccatcctgctgagcgacatcctgagagtgaacaccgagatcaccaaggcccccctgagcgcctctatgatcaagagatacgacgagcaccaccaggacctgaccctgctgaaagctctcgtgcggcagcagctgcctgagaagtacaaagagattttcttcgaccagagcaagaacggctacgccggctacatcgatggcggagccagccaggaagagttctacaagttcatcaagcccatcctggaaaagatggacggcaccgaggaactgctcgtgaagctgaacagagaggacctgctgcggaagcagcggaccttcgacaacggcagcatcccccaccagatccacctgggagagctgcacgccattctgcggcggcaggaagatttttacccattcctgaaggacaaccgggaaaagatcgagaagatcctgaccttccgcatcccctactacgtgggccctctggccaggggaaacagcagattcgcctggatgaccagaaagagcgaggaaaccatcaccccctggaacttcgaggaagtggtggacaagggcgccagcgcccagagcttcatcgagcggatgaccaacttcgataagaacctgcccaacgagaaggtgctgcccaagcacagcctgctgtacgagtacttcaccgtgtacaacgagctgaccaaagtgaaatacgtgaccgagggaatgagaaagcccgccttcctgagcggcgagcagaaaaaagccatcgtggacctgctgttcaagaccaaccggaaagtgaccgtgaagcagctgaaagaggactacttcaagaaaatcgagtgcttcgactccgtggaaatctccggcgtggaagatcggttcaacgcctccctgggcacataccacgatctgctgaaaattatcaaggacaaggacttcctggacaatgaggaaaacgaggacattctggaagatatcgtgctgaccctgacactgtttgaggacagagagatgatcgaggaacggctgaaaacctatgcccacctgttcgacgacaaagtgatgaagcagctgaagcggcggagatacaccggctggggcaggctgagccggaagctgatcaacggcatccgggacaagcagtccggcaagacaatcctggatttcctgaagtccgacggcttcgccaacagaaacttcatgcagctgatccacgacgacagcctgacctttaaagaggacatccagaaagcccaggtgtccggccagggcgatagcctgcacgagcacattgccaatctggccggcagccccgccattaagaagggcatcctgcagacagtgaaggtggtggacgagctcgtgaaagtgatgggccggcacaagcccgagaacatcgtgatcgaaatggccagagagaaccagaccacccagaagggacagaagaacagccgcgagagaatgaagcggatcgaagagggcatcaaagagctgggcagccagatcctgaaagaacaccccgtggaaaacacccagctgcagaacgagaagctgtacctgtactacctgcagaatgggcgggatatgtacgtggaccaggaactggacatcaaccggctgtccgactacgatgtggacgctatcgtgcctcagagctttctgaaggacgactccatcgataacaaagtgctgactcggagcgacaagaaccggggcaagagcgacaacgtgccctccgaagaggtcgtgaagaagatgaagaactactggcgccagctgctgaatgccaagctgattacccagaggaagttcgacaatctgaccaaggccgagagaggcggcctgagcgaactggataaggccggcttcatcaagagacagctggtggaaacccggcagatcacaaagcacgtggcacagatcctggactcccggatgaacactaagtacgacgagaacgacaaactgatccgggaagtgaaagtgatcaccctgaagtccaagctggtgtccgatttccggaaggatttccagttttacaaagtgcgcgagatcaacaactaccaccacgcccacgacgcctacctgaacgccgtcgtgggaaccgccctgatcaaaaagtaccctaagctggaaagcgagttcgtgtacggcgactacaaggtgtacgacgtgcggaagatgatcgccaagagcgagcaggaaatcggcaaggctaccgccaagtacttcttctacagcaacatcatgaactttttcaagaccgagattaccctggccaacggcgagatccggaagcggcctctgatcgagacaaacggcgaaacaggcgagatcgtgtgggataagggccgggactttgccaccgtgcggaaagtgctgtctatgccccaagtgaatatcgtgaaaaagaccgaggtgcagacaggcggcttcagcaaagagtctatcctgcccaagaggaacagcgacaagctgatcgccagaaagaaggactgggaccctaagaagtacggcggcttcgacagccccaccgtggcctattctgtgctggtggtggccaaagtggaaaagggcaagtccaagaaactgaagagtgtgaaagagctgctggggatcaccatcatggaaagaagcagcttcgagaagaatcccatcgactttctggaagccaagggctacaaagaagtgaaaaaggacctgatcatcaagctgcctaagtactccctgttcgagctggaaaacggccggaagagaatgctggcctctgccggcgaactgcagaagggaaacgaactggccctgccctccaaatatgtgaacttcctgtacctggccagccactatgagaagctgaagggctcccccgaggataatgagcagaaacagctgtttgtggaacagcacaaacactacctggacgagatcatcgagcagatcagcgagttctccaagagagtgatcctggccgacgctaatctggacaaggtgctgagcgcctacaacaagcacagagacaagcctatcagagagcaggccgagaatatcatccacctgtttaccctgaccaatctgggagcccctgccgccttcaagtactttgacaccaccatcgaccggaagaggtacaccagcaccaaagaggtgctggacgccaccctgatccaccagagcatcaccggcctgtacgagacacggatcgacctgtctcagctgggaggcgacgcctatccctatgacgtgcccgattatgccagcctgggcagcggctcccccaagaaaaaacgcaaggtggaagatcctaagaaaaagcggaaagtggacggcggagggccgagctctggcgcacccccaccaagtggagggtctcctgccgggtccccaacatctactgaagaaggcaccagcgaatccgcaacgcccgagtcaggccctggtacctccacagaaccatctgaaggtagtgcgcctggttccccagctggaagccctacttccaccgaagaaggcacgtcaaccgaaccaagtgaaggatctgcccctgggaccagcactgaaccatctgagatgaaccatgaccaggaatttgaccccccaaaggtttacccacctgtgccagctgagaagaggaagcccatccgcgtgctgtctctctttgatgggattgctacagggctcctggtgctgaaggacctgggcatccaagtggaccgctacattgcctccgaggtgtgtgaggactccatcacggtgggcatggtgcggcaccagggaaagatcatgtacgtcggggacgtccgcagcgtcacacagaagcatatccaggagtggggcccattcgacctggtgattggaggcagtccctgcaatgacctctccattgtcaaccctgcccgcaagggactttatgagggtactggccgcctcttctttgagttctaccgcctcctgcatgatgcgcggcccaaggagggagatgatcgccccttcttctggctctttgagaatgtggtggccatgggcgttagtgacaagagggacatctcgcgatttcttgagtctaaccccgtgatgattgacgccaaagaagtgtctgctgcacacagggcccgttacttctggggtaaccttcctggcatgaacaggcctttggcatccactgtgaatgataagctggagctgcaagagtgtctggagcacggcagaatagccaagttcagcaaagtgaggaccattaccaccaggtcaaactctataaagcagggcaaagaccagcatttccccgtcttcatgaacgagaaggaggacatcctgtggtgcactgaaatggaaagggtgtttggcttccccgtccactacacagacgtctccaacatgagccgcttggcgaggcagagactgctgggccgatcgtggagcgtgccggtcatccgccacctcttcgctccgctgaaggaatattttgcttgtgtgtctagcggcaatagtaacgctaacagccgcgggccgagcttcagcagcggcctggtgccgttaagcttgcgcggcagccatatgggccctatggagatatacaagacagtgtctgcatggaagagacagccagtgcgggtactgagcctcttcagaaacatcgacaaggtactaaagagtttgggcttcttggaaagcggttctggttctgggggaggaacgctgaagtacgtggaagatgtcacaaatgtcgtgaggagagacgtggagaaatggggcccctttgacctggtgtacggctcgacgcagcccctaggcagctcttgtgatcgctgtcccggctggtacatgttccagttccaccggatcctgcagtatgcgctgcctcgccaggagagtcagcggcccttcttctggatattcatggacaatctgctgctgactgaggatgaccaagagacaactacccgcttccttcagacagaggctgtgaccctccaggatgtccgtggcagagactaccagaatgctatgcgggtgtggagcaacattccagggctgaagagcaagcatgcgcccctgaccccaaaggaagaagagtatctgcaagcccaagtcagaagcaggagcaagctggacgccccgaaagttgacctcctggtgaagaactgccttctcccgctgagagagtacttcaagtatttttctcaaaactcacttcctcttgacggcagcggcagcgagacccccggtaccagcgagagcgccacccccgagagccggacactggtgaccttcaaggatgtatttgtggacttcaccagggaggagtggaagctgctggacactgctcagcagatcgtgtacagaaatgtgatgctggagaactataagaacctggtttccttgggttatcagcttactaagccagatgtgatcctccggttggagaagggagaagagccctgagatcccaagcacgcagcaatgcagctcaaaacgcttagcctagccacacccccacgggaaacagcagtgattaacctttagcaataaacgaaagtttaactaagctatactaaccccagggttggtcaatttcgtgccagccacaccctggtactgcatgcacgcaatgctagctgcccctttcccgtcctgggcaccccgagtctcccccgaccccgggtcccaggtatgctcccacctccacctgccccactcaccacctctgctagttccagacacctccgaagatgg

SEQ ID NO: 277 - RNA, 6747 nt, synthetic construct
  misc_feature 1..6747: note = V25 mRNA
  source 1..6747: mol_type = other RNA
aggactcactatttgttttcgcgcccagttgcaaaaagtgtcgacatttgcttctgacacaactgtgttcactagcaacctcaaacagacaccgccaccatggtccctgctgctaagagagtgaaactggatggatccgacaagaagtacagcatcggcctggccatcggcaccaactctgtgggctgggccgtgatcaccgacgagtacaaggtgcccagcaagaaattcaaggtgctgggcaacaccgaccggcacagcatcaagaagaacctgatcggcgccctgctgttcgacagcggagaaacagccgaggccacccggctgaagagaaccgccagaagaagatacaccagacggaagaaccggatctgctatctgcaagagatcttcagcaacgagatggccaaggtggacgacagcttcttccacagactggaagagtccttcctggtggaagaggataagaagcacgagcggcaccccatcttcggcaacatcgtggacgaggtggcctaccacgagaagtaccccaccatctaccacctgagaaagaaactggtggacagcaccgacaaggccgacctgcggctgatctatctggccctggcccacatgatcaagttccggggccacttcctgatcgagggcgacctgaaccccgacaacagcgacgtggacaagctgttcatccagctggtgcagacctacaaccagctgttcgaggaaaaccccatcaacgccagcggcgtggacgccaaggccatcctgtctgccagactgagcaagagcagacggctggaaaatctgatcgcccagctgcccggcgagaagaagaatggcctgttcggcaacctgattgccctgagcctgggcctgacccccaacttcaagagcaacttcgacctggccgaggatgccaaactgcagctgagcaaggacacctacgacgacgacctggacaacctgctggcccagatcggcgaccagtacgccgacctgtttctggccgccaagaacctgtccgacgccatcctgctgagcgacatcctgagagtgaacaccgagatcaccaaggcccccctgagcgcctctatgatcaagagatacgacgagcaccaccaggacctgaccctgctgaaagctctcgtgcggcagcagctgcctgagaagtacaaagagattttcttcgaccagagcaagaacggctacgccggctacatcgatggcggagccagccaggaagagttctacaagttcatcaagcccatcctggaaaagatggacggcaccgaggaactgctcgtgaagctgaacagagaggacctgctgcggaagcagcggaccttcgacaacggcagcatcccccaccagatccacctgggagagctgcacgccattctgcggcggcaggaagatttttacccattcctgaaggacaaccgggaaaagatcgagaagatcctgaccttccgcatcccctactacgtgggccctctggccaggggaaacagcagattcgcctggatgaccagaaagagcgaggaaaccatcaccccctggaacttcgaggaagtggtggacaagggcgccagcgcccagagcttcatcgagcggatgaccaacttcgataagaacctgcccaacgagaaggtgctgcccaagcacagcctgctgtacgagtacttcaccgtgtacaacgagctgaccaaagtgaaatacgtgaccgagggaatgagaaagcccgccttcctgagcggcgagcagaaaaaagccatcgtggacctgctgttcaagaccaaccggaaagtgaccgtgaagcagctgaaagaggactacttcaagaaaatcgagtgcttcgactccgtggaaatctccggcgtggaagatcggttcaacgcctccctgggcacataccacgatctgctgaaaattatcaaggacaaggacttcctggacaatgaggaaaacgaggacattctggaagatatcgtgctgaccctgacactgtttgaggacagagagatgatcgaggaacggctgaaaacctatgcccacctgttcgacgacaaagtgatgaagcagctgaagcggcggagatacaccggctggggcaggctgagccggaagctgatcaacggcatccgggacaagcagtccggcaagacaatcctggatttcctgaagtccgacggcttcgccaacagaaacttcatgcagctgatccacgacgacagcctgacctttaaagaggacatccagaaagcccaggtgtccggccagggcgatagcctgcacgagcacattgccaatctggccggcagccccgccattaagaagggcatcctgcagacagtgaaggtggtggacgagctcgtgaaagtgatgggccggcacaagcccgagaacatcgtgatcgaaatggccagagagaaccagaccacccagaagggacagaagaacagccgcgagagaatgaagcggatcgaagagggcatcaaagagctgggcagccagatcctgaaagaacaccccgtggaaaacacccagctgcagaacgagaagctgtacctgtactacctgcagaatgggcgggatatgtacgtggaccaggaactggacatcaaccggctgtccgactacgatgtggacgctatcgtgcctcagagctttctgaaggacgactccatcgataacaaagtgctgactcggagcgacaagaaccggggcaagagcgacaacgtgccctccgaagaggtcgtgaagaagatgaagaactactggcgccagctgctgaatgccaagctgattacccagaggaagttcgacaatctgaccaaggccgagagaggcggcctgagcgaactggataaggccggcttcatcaagagacagctggtggaaacccggcagatcacaaagcacgtggcacagatcctggactcccggatgaacactaagtacgacgagaacgacaaactgatccgggaagtgaaagtgatcaccctgaagtccaagctggtgtccgatttccggaaggatttccagttttacaaagtgcgcgagatcaacaactaccaccacgcccacgacgcctacctgaacgccgtcgtgggaaccgccctgatcaaaaagtaccctaagctggaaagcgagttcgtgtacggcgactacaaggtgtacgacgtgcggaagatgatcgccaagagcgagcaggaaatcggcaaggctaccgccaagtacttcttctacagcaacatcatgaactttttcaagaccgagattaccctggccaacggcgagatccggaagcggcctctgatcgagacaaacggcgaaacaggcgagatcgtgtgggataagggccgggactttgccaccgtgcggaaagtgctgtctatgccccaagtgaatatcgtgaaaaagaccgaggtgcagacaggcggcttcagcaaagagtctatcctgcccaagaggaacagcgacaagctgatcgccagaaagaaggactgggaccctaagaagtacggcggcttcgacagccccaccgtggcctattctgtgctggtggtggccaaagtggaaaagggcaagtccaagaaactgaagagtgtgaaagagctgctggggatcaccatcatggaaagaagcagcttcgagaagaatcccatcgactttctggaagccaagggctacaaagaagtgaaaaaggacctgatcatcaagctgcctaagtactccctgttcgagctggaaaacggccggaagagaatgctggcctctgccggcgaactgcagaagggaaacgaactggccctgccctccaaatatgtgaacttcctgtacctggccagccactatgagaagctgaagggctcccccgaggataatgagcagaaacagctgtttgtggaacagcacaaacactacctggacgagatcatcgagcagatcagcgagttctccaagagagtgatcctggccgacgctaatctggacaaggtgctgagcgcctacaacaagcacagagacaagcctatcagagagcaggccgagaatatcatccacctgtttaccctgaccaatctgggagcccctgccgccttcaagtactttgacaccaccatcgaccggaagaggtacaccagcaccaaagaggtgctggacgccaccctgatccaccagagcatcaccggcctgtacgagacacggatcgacctgtctcagctgggaggcgacgcctatccctatgacgtgcccgattatgccagcctgggcagcggctcccccaagaaaaaacgcaaggtggaagatcctaagaaaaagcggaaagtggacggcggagggccgagctctggcgcacccccaccaagtggagggtctcctgccgggtccccaacatctactgaagaaggcaccagcgaatccgcaacgcccgagtcaggccctggtacctccacagaaccatctgaaggtagtgcgcctggttccccagctggaagccctacttccaccgaagaaggcacgtcaaccgaaccaagtgaaggatctgcccctgggaccagcactgaaccatctgagatgggccctatggagatatacaagacagtgtctgcatggaagagacagccagtgcgggtactgagcctcttcagaaacatcgacaaggtactaaagagtttgggcttcttggaaagcggttctggttctgggggaggaacgctgaagtacgtggaagatgtcacaaatgtcgtgaggagagacgtggagaaatggggcccctttgacctggtgtacggctcgacgcagcccctaggcagctcttgtgatcgctgtcccggctggtacatgttccagttccaccggatcctgcagtatgcgctgcctcgccaggagagtcagcggcccttcttctggatattcatggacaatctgctgctgactgaggatgaccaagagacaactacccgcttccttcagacagaggctgtgaccctccaggatgtccgtggcagagactaccagaatgctatgcgggtgtggagcaacattccagggctgaagagcaagcatgcgcccctgaccccaaaggaagaagagtatctgcaagcccaagtcagaagcaggagcaagctggacgccccgaaagttgacctcctggtgaagaactgccttctcccgctgagagagtacttcaagtatttttctcaaaactcacttcctctttctagcggcaatagtaacgctaacagccgcgggccgagcttcagcagcggcctggtgccgttaagcttgcgcggcagccatatgaaccatgaccaggaatttgaccccccaaaggtttacccacctgtgccagctgagaagaggaagcccatccgcgtgctgtctctctttgatgggattgctacagggctcctggtgctgaaggacctgggcatccaagtggaccgctacattgcctccgaggtgtgtgaggactccatcacggtgggcatggtgcggcaccagggaaagatcatgtacgtcggggacgtccgcagcgtcacacagaagcatatccaggagtggggcccattcgacctggtgattggaggcagtccctgcaatgacctctccattgtcaaccctgcccgcaagggactttatgagggtactggccgcctcttctttgagttctaccgcctcctgcatgatgcgcggcccaaggagggagatgatcgccccttcttctggctctttgagaatgtggtggccatgggcgttagtgacaagagggacatctcgcgatttcttgagtctaaccccgtgatgattgacgccaaagaagtgtctgctgcacacagggcccgttacttctggggtaaccttcctggcatgaacaggcctttggcatccactgtgaatgataagctggagctgcaagagtgtctggagcacggcagaatagccaagttcagcaaagtgaggaccattaccaccaggtcaaactctataaagcagggcaaagaccagcatttccccgtcttcatgaacgagaaggaggacatcctgtggtgcactgaaatggaaagggtgtttggcttccccgtccactacacagacgtctccaacatgagccgcttggcgaggcagagactgctgggccgatcgtggagcgtgccggtcatccgccacctcttcgctccgctgaaggaatattttgcttgtgtggacggcagcggcagcgagacccccggtaccagcgagagcgccacccccgagagccggacactggtgaccttcaaggatgtatttgtggacttcaccagggaggagtggaagctgctggacactgctcagcagatcgtgtacagaaatgtgatgctggagaactataagaacctggtttccttgggttatcagcttactaagccagatgtgatcctccggttggagaagggagaagagccctgagatcccaagcacgcagcaatgcagctcaaaacgcttagcctagccacacccccacgggaaacagcagtgattaacctttagcaataaacgaaagtttaactaagctatactaaccccagggttggtcaatttcgtgccagccacaccctggtactgcatgcacgcaatgctagctgcccctttcccgtcctgggcaccccgagtctcccccgaccccgggtcccaggtatgctcccacctccacctgccccactcaccacctctgctagttccagacacctccgaagatgg

SEQ ID NO: 278 - RNA, 6976 nt, synthetic construct
  misc_feature 1..6976: note = V26 mRNA
  source 1..6976: mol_type = other RNA
aggactcactatttgttttcgcgcccagttgcaaaaagtgtcgacatttgcttctgacacaactgtgttcactagcaacctcaaacagacaccgccaccatggtccctgctgctaagagagtgaaactggatggatccgacaagaagtacagcatcggcctggccatcggcaccaactctgtgggctgggccgtgatcaccgacgagtacaaggtgcccagcaagaaattcaaggtgctgggcaacaccgaccggcacagcatcaagaagaacctgatcggcgccctgctgttcgacagcggagaaacagccgaggccacccggctgaagagaaccgccagaagaagatacaccagacggaagaaccggatctgctatctgcaagagatcttcagcaacgagatggccaaggtggacgacagcttcttccacagactggaagagtccttcctggtggaagaggataagaagcacgagcggcaccccatcttcggcaacatcgtggacgaggtggcctaccacgagaagtaccccaccatctaccacctgagaaagaaactggtggacagcaccgacaaggccgacctgcggctgatctatctggccctggcccacatgatcaagttccggggccacttcctgatcgagggcgacctgaaccccgacaacagcgacgtggacaagctgttcatccagctggtgcagacctacaaccagctgttcgaggaaaaccccatcaacgccagcggcgtggacgccaaggccatcctgtctgccagactgagcaagagcagacggctggaaaatctgatcgcccagctgcccggcgagaagaagaatggcctgttcggcaacctgattgccctgagcctgggcctgacccccaacttcaagagcaacttcgacctggccgaggatgccaaactgcagctgagcaaggacacctacgacgacgacctggacaacctgctggcccagatcggcgaccagtacgccgacctgtttctggccgccaagaacctgtccgacgccatcctgctgagcgacatcctgagagtgaacaccgagatcaccaaggcccccctgagcgcctctatgatcaagagatacgacgagcaccaccaggacctgaccctgctgaaagctctcgtgcggcagcagctgcctgagaagtacaaagagattttcttcgaccagagcaagaacggctacgccggctacatcgatggcggagccagccaggaagagttctacaagttcatcaagcccatcctggaaaagatggacggcaccgaggaactgctcgtgaagctgaacagagaggacctgctgcggaagcagcggaccttcgacaacggcagcatcccccaccagatccacctgggagagctgcacgccattctgcggcggcaggaagatttttacccattcctgaaggacaaccgggaaaagatcgagaagatcctgaccttccgcatcccctactacgtgggccctctggccaggggaaacagcagattcgcctggatgaccagaaagagcgaggaaaccatcaccccctggaacttcgaggaagtggtggacaagggcgccagcgcccagagcttcatcgagcggatgaccaacttcgataagaacctgcccaacgagaaggtgctgcccaagcacagcctgctgtacgagtacttcaccgtgtacaacgagctgaccaaagtgaaatacgtgaccgagggaatgagaaagcccgccttcctgagcggcgagcagaaaaaagccatcgtggacctgctgttcaagaccaaccggaaagtgaccgtgaagcagctgaaagaggactacttcaagaaaatcgagtgcttcgactccgtggaaatctccggcgtggaagatcggttcaacgcctccctgggcacataccacgatctgctgaaaattatcaaggacaaggacttcctggacaatgaggaaaacgaggacattctggaagatatcgtgctgaccctgacactgtttgaggacagagagatgatcgaggaacggctgaaaacctatgcccacctgttcgacgacaaagtgatgaagcagctgaagcggcggagatacaccggctggggcaggctgagccggaagctgatcaacggcatccgggacaagcagtccggcaagacaatcctggatttcctgaagtccgacggcttcgccaacagaaacttcatgcagctgatccacgacgacagcctgacctttaaagaggacatccagaaagcccaggtgtccggccagggcgatagcctgcacgagcacattgccaatctggccggcagccccgccattaagaagggcatcctgcagacagtgaaggtggtggacgagctcgtgaaagtgatgggccggcacaagcccgagaacatcgtgatcgaaatggccagagagaaccagaccacccagaagggacagaagaacagccgcgagagaatgaagcggatcgaagagggcatcaaagagctgggcagccagatcctgaaagaacaccccgtggaaaacacccagctgcagaacgagaagctgtacctgtactacctgcagaatgggcgggatatgtacgtggaccaggaactggacatcaaccggctgtccgactacgatgtggacgctatcgtgcctcagagctttctgaaggacgactccatcgataacaaagtgctgactcggagcgacaagaaccggggcaagagcgacaacgtgccctccgaagaggtcgtgaagaagatgaagaactactggcgccagctgctgaatgccaagctgattacccagaggaagttcgacaatctgaccaaggccgagagaggcggcctgagcgaactggataaggccggcttcatcaagagacagctggtggaaacccggcagatcacaaagcacgtggcacagatcctggactcccggatgaacactaagtacgacgagaacgacaaactgatccgggaagtgaaagtgatcaccctgaagtccaagctggtgtccgatttccggaaggatttccagttttacaaagtgcgcgagatcaacaactaccaccacgcccacgacgcctacctgaacgccgtcgtgggaaccgccctgatcaaaaagtaccctaagctggaaagcgagttcgtgtacggcgactacaaggtgtacgacgtgcggaagatgatcgccaagagcgagcaggaaatcggcaaggctaccgccaagtacttcttctacagcaacatcatgaactttttcaagaccgagattaccctggccaacggcgagatccggaagcggcctctgatcgagacaaacggcgaaacaggcgagatcgtgtgggataagggccgggactttgccaccgtgcggaaagtgctgtctatgccccaagtgaatatcgtgaaaaagaccgaggtgcagacaggcggcttcagcaaagagtctatcctgcccaagaggaacagcgacaagctgatcgccagaaagaaggactgggaccctaagaagtacggcggcttcgacagccccaccgtggcctattctgtgctggtggtggccaaagtggaaaagggcaagtccaagaaactgaagagtgtgaaagagctgctggggatcaccatcatggaaagaagcagcttcgagaagaatcccatcgactttctggaagccaagggctacaaagaagtgaaaaaggacctgatcatcaagctgcctaagtactccctgttcgagctggaaaacggccggaagagaatgctggcctctgccggcgaactgcagaagggaaacgaactggccctgccctccaaatatgtgaacttcctgtacctggccagccactatgagaagctgaagggctcccccgaggataatgagcagaaacagctgtttgtggaacagcacaaacactacctggacgagatcatcgagcagatcagcgagttctccaagagagtgatcctggccgacgctaatctggacaaggtgctgagcgcctacaacaagcacagagacaagcctatcagagagcaggccgagaatatcatccacctgtttaccctgaccaatctgggagcccctgccgccttcaagtactttgacaccaccatcgaccggaagaggtacaccagcaccaaagaggtgctggacgccaccctgatccaccagagcatcaccggcctgtacgagacacggatcgacctgtctcagctgggaggcgacgcctatccctatgacgtgcccgattatgccagcctgggcagcggctcccccaagaaaaaacgcaaggtggaagatcctaagaaaaagcggaaagtggacggcggagggccgagctctggcgcacccccaccaagtggagggtctcctgccgggtccccaacatctactgaagaaggcaccagcgaatccgcaacgcccgagtcaggccctggtacctccacagaaccatctgaaggtagtgcgcctggttccccagctggaagccctacttccaccgaagaaggcacgtcaaccgaaccaagtgaaggatctgcccctgggaccagcactgaaccatctgagcggacactggtgaccttcaaggatgtatttgtggacttcaccagggaggagtggaagctgctggacactgctcagcagatcgtgtacagaaatgtgatgctggagaactataagaacctggtttccttgggttatcagcttactaagccagatgtgatcctccggttggagaagggagaagagcccagcggcagcgagacccccggtaccagcgagagcgctacacccgaatccggccccggcagccccgccggcagccctacaagcaccgaggagggcacctccgaatccgccacccctgagagcggacccggcagcgagcctgccacaagcggcagcgagacacctggaacaagcgagagcgccacacctgaaagcggccccggaacatccaccgagcctagcgagggcagcgcccctggcacaagcacagagccttccgagagcgccacccccgagagcatgggccctatggagatatacaagacagtgtctgcatggaagagacagccagtgcgggtactgagcctcttcagaaacatcgacaaggtactaaagagtttgggcttcttggaaagcggttctggttctgggggaggaacgctgaagtacgtggaagatgtcacaaatgtcgtgaggagagacgtggagaaatggggcccctttgacctggtgtacggctcgacgcagcccctaggcagctcttgtgatcgctgtcccggctggtacatgttccagttccaccggatcctgcagtatgcgctgcctcgccaggagagtcagcggcccttcttctggatattcatggacaatctgctgctgactgaggatgaccaagagacaactacccgcttccttcagacagaggctgtgaccctccaggatgtccgtggcagagactaccagaatgctatgcgggtgtggagcaacattccagggctgaagagcaagcatgcgcccctgaccccaaaggaagaagagtatctgcaagcccaagtcagaagcaggagcaagctggacgccccgaaagttgacctcctggtgaagaactgccttctcccgctgagagagtacttcaagtatttttctcaaaactcacttcctctttctagcggcaatagtaacgctaacagccgcgggccgagcttcagcagcggcctggtgccgttaagcttgcgcggcagccatatgaaccatgaccaggaatttgaccccccaaaggtttacccacctgtgccagctgagaagaggaagcccatccgcgtgctgtctctctttgatgggattgctacagggctcctggtgctgaaggacctgggcatccaagtggaccgctacattgcctccgaggtgtgtgaggactccatcacggtgggcatggtgcggcaccagggaaagatcatgtacgtcggggacgtccgcagcgtcacacagaagcatatccaggagtggggcccattcgacctggtgattggaggcagtccctgcaatgacctctccattgtcaaccctgcccgcaagggactttatgagggtactggccgcctcttctttgagttctaccgcctcctgcatgatgcgcggcccaaggagggagatgatcgccccttcttctggctctttgagaatgtggtggccatgggcgttagtgacaagagggacatctcgcgatttcttgagtctaaccccgtgatgattgacgccaaagaagtgtctgctgcacacagggcccgttacttctggggtaaccttcctggcatgaacaggcctttggcatccactgtgaatgataagctggagctgcaagagtgtctggagcacggcagaatagccaagttcagcaaagtgaggaccattaccaccaggtcaaactctataaagcagggcaaagaccagcatttccccgtcttcatgaacgagaaggaggacatcctgtggtgcactgaaatggaaagggtgtttggcttccccgtccactacacagacgtctccaacatgagccgcttggcgaggcagagactgctgggccgatcgtggagcgtgccggtcatccgccacctcttcgctccgctgaaggaatattttgcttgtgtgtgataatagggatcccaagcacgcagcaatgcagctcaaaacgcttagcctagccacacccccacgggaaacagcagtgattaacctttagcaataaacgaaagtttaactaagctatactaaccccagggttggtcaatttcgtgccagccacaccctggtactgcatgcacgcaatgctagctgcccctttcccgtcctgggcaccccgagtctcccccgaccccgggtcccaggtatgctcccacctccacctgccccactcaccacctctgctagttccagacacctccgaagatgg

SEQ ID NO: 279 - RNA, 6976 nt, synthetic construct
  misc_feature 1..6976: note = V27 mRNA
  source 1..6976: mol_type = other RNA
aggactcactatttgttttcgcgcccagttgcaaaaagtgtcgacatttgcttctgacacaactgtgttcactagcaacctcaaacagacaccgccaccatggtccctgctgctaagagagtgaaactggatggatccgacaagaagtacagcatcggcctggccatcggcaccaactctgtgggctgggccgtgatcaccgacgagtacaaggtgcccagcaagaaattcaaggtgctgggcaacaccgaccggcacagcatcaagaagaacctgatcggcgccctgctgttcgacagcggagaaacagccgaggccacccggctgaagagaaccgccagaagaagatacaccagacggaagaaccggatctgctatctgcaagagatcttcagcaacgagatggccaaggtggacgacagcttcttccacagactggaagagtccttcctggtggaagaggataagaagcacgagcggcaccccatcttcggcaacatcgtggacgaggtggcctaccacgagaagtaccccaccatctaccacctgagaaagaaactggtggacagcaccgacaaggccgacctgcggctgatctatctggccctggcccacatgatcaagttccggggccacttcctgatcgagggcgacctgaaccccgacaacagcgacgtggacaagctgttcatccagctggtgcagacctacaaccagctgttcgaggaaaaccccatcaacgccagcggcgtggacgccaaggccatcctgtctgccagactgagcaagagcagacggctggaaaatctgatcgcccagctgcccggcgagaagaagaatggcctgttcggcaacctgattgccctgagcctgggcctgacccccaacttcaagagcaacttcgacctggccgaggatgccaaactgcagctgagcaaggacacctacgacgacgacctggacaacctgctggcccagatcggcgaccagtacgccgacctgtttctggccgccaagaacctgtccgacgccatcctgctgagcgacatcctgagagtgaacaccgagatcaccaaggcccccctgagcgcctctatgatcaagagatacgacgagcaccaccaggacctgaccctgctgaaagctctcgtgcggcagcagctgcctgagaagtacaaagagattttcttcgaccagagcaagaacggctacgccggctacatcgatggcggagccagccaggaagagttctacaagttcatcaagcccatcctggaaaagatggacggcaccgaggaactgctcgtgaagctgaacagagaggacctgctgcggaagcagcggaccttcgacaacggcagcatcccccaccagatccacctgggagagctgcacgccattctgcggcggcaggaagatttttacccattcctgaaggacaaccgggaaaagatcgagaagatcctgaccttccgcatcccctactacgtgggccctctggccaggggaaacagcagattcgcctggatgaccagaaagagcgaggaaaccatcaccccctggaacttcgaggaagtggtggacaagggcgccagcgcccagagcttcatcgagcggatgaccaacttcgataagaacctgcccaacgagaaggtgctgcccaagcacagcctgctgtacgagtacttcaccgtgtacaacgagctgaccaaagtgaaatacgtgaccgagggaatgagaaagcccgccttcctgagcggcgagcagaaaaaagccatcgtggacctgctgttcaagaccaaccggaaagtgaccgtgaagcagctgaaagaggactacttcaagaaaatcgagtgcttcgactccgtggaaatctccggcgtggaagatcggttcaacgcctccctgggcacataccacgatctgctgaaaattatcaaggacaaggacttcctggacaatgaggaaaacgaggacattctggaagatatcgtgctgaccctgacactgtttgaggacagagagatgatcgaggaacggctgaaaacctatgcccacctgttcgacgacaaagtgatgaagcagctgaagcggcggagatacaccggctggggcaggctgagccggaagctgatcaacggcatccgggacaagcagtccggcaagacaatcctggatttcctgaagtccgacggcttcgccaacagaaacttcatgcagctgatccacgacgacagcctgacctttaaagaggacatccagaaagcccaggtgtccggccagggcgatagcctgcacgagcacattgccaatctggccggcagccccgccattaagaagggcatcctgcagacagtgaaggtggtggacgagctcgtgaaagtgatgggccggcacaagcccgagaacatcgtgatcgaaatggccagagagaaccagaccacccagaagggacagaagaacagccgcgagagaatgaagcggatcgaagagggcatcaaagagctgggcagccagatcctgaaagaacaccccgtggaaaacacccagctgcagaacgagaagctgtacctgtactacctgcagaatgggcgggatatgtacgtggaccaggaactggacatcaaccggctgtccgactacgatgtggacgctatcgtgcctcagagctttctgaaggacgactccatcgataacaaagtgctgactcggagcgacaagaaccggggcaagagcgacaacgtgccctccgaagaggtcgtgaagaagatgaagaactactggcgccagctgctgaatgccaagctgattacccagaggaagttcgacaatctgaccaaggccgagagaggcggcctgagcgaactggataaggccggcttcatcaagagacagctggtggaaacccggcagatcacaaagcacgtggcacagatcctggactcccggatgaacactaagtacgacgagaacgacaaactgatccgggaagtgaaagtgatcaccctgaagtccaagctggtgtccgatttccggaaggatttccagttttacaaagtgcgcgagatcaacaactaccaccacgcccacgacgcctacctgaacgccgtcgtgggaaccgccctgatcaaaaagtaccctaagctggaaagcgagttcgtgtacggcgactacaaggtgtacgacgtgcggaagatgatcgccaagagcgagcaggaaatcggcaaggctaccgccaagtacttcttctacagcaacatcatgaactttttcaagaccgagattaccctggccaacggcgagatccggaagcggcctctgatcgagacaaacggcgaaacaggcgagatcgtgtgggataagggccgggactttgccaccgtgcggaaagtgctgtctatgccccaagtgaatatcgtgaaaaagaccgaggtgcagacaggcggcttcagcaaagagtctatcctgcccaagaggaacagcgacaagctgatcgccagaaagaaggactgggaccctaagaagtacggcggcttcgacagccccaccgtggcctattctgtgctggtggtggccaaagtggaaaagggcaagtccaagaaactgaagagtgtgaaagagctgctggggatcaccatcatggaaagaagcagcttcgagaagaatcccatcgactttctggaagccaagggctacaaagaagtgaaaaaggacctgatcatcaagctgcctaagtactccctgttcgagctggaaaacggccggaagagaatgctggcctctgccggcgaactgcagaagggaaacgaactggccctgccctccaaatatgtgaacttcctgtacctggccagccactatgagaagctgaagggctcccccgaggataatgagcagaaacagctgtttgtggaacagcacaaacactacctggacgagatcatcgagcagatcagcgagttctccaagagagtgatcctggccgacgctaatctggacaaggtgctgagcgcctacaacaagcacagagacaagcctatcagagagcaggccgagaatatcatccacctgtttaccctgaccaatctgggagcccctgccgccttcaagtactttgacaccaccatcgaccggaagaggtacaccagcaccaaagaggtgctggacgccaccctgatccaccagagcatcaccggcctgtacgagacacggatcgacctgtctcagctgggaggcgacgcctatccctatgacgtgcccgattatgccagcctgggcagcggctcccccaagaaaaaacgcaaggtggaagatcctaagaaaaagcggaaagtggacggcggagggccgagctctggcgcacccccaccaagtggagggtctcctgccgggtccccaacatctactgaagaaggcaccagcgaatccgcaacgcccgagtcaggccctggtacctccacagaaccatctgaaggtagtgcgcctggttccccagctggaagccctacttccaccgaagaaggcacgtcaaccgaaccaagtgaaggatctgcccctgggaccagcactgaaccatctgagcggacactggtgaccttcaaggatgtatttgtggacttcaccagggaggagtggaagctgctggacactgctcagcagatcgtgtacagaaatgtgatgctggagaactataagaacctggtttccttgggttatcagcttactaagccagatgtgatcctccggttggagaagggagaagagcccagcggcagcgagacccccggtaccagcgagagcgctacacccgaatccggccccggcagccccgccggcagccctacaagcaccgaggagggcacctccgaatccgccacccctgagagcggacccggcagcgagcctgccacaagcggcagcgagacacctggaacaagcgagagcgccacacctgaaagcggccccggaacatccaccgagcctagcgagggcagcgcccctggcacaagcacagagccttccgagagcgccacccccgagagcatgaaccatgaccaggaatttgaccccccaaaggtttacccacctgtgccagctgagaagaggaagcccatccgcgtgctgtctctctttgatgggattgctacagggctcctggtgctgaaggacctgggcatccaagtggaccgctacattgcctccgaggtgtgtgaggactccatcacggtgggcatggtgcggcaccagggaaagatcatgtacgtcggggacgtccgcagcgtcacacagaagcatatccaggagtggggcccattcgacctggtgattggaggcagtccctgcaatgacctctccattgtcaaccctgcccgcaagggactttatgagggtactggccgcctcttctttgagttctaccgcctcctgcatgatgcgcggcccaaggagggagatgatcgccccttcttctggctctttgagaatgtggtggccatgggcgttagtgacaagagggacatctcgcgatttcttgagtctaaccccgtgatgattgacgccaaagaagtgtctgctgcacacagggcccgttacttctggggtaaccttcctggcatgaacaggcctttggcatccactgtgaatgataagctggagctgcaagagtgtctggagcacggcagaatagccaagttcagcaaagtgaggaccattaccaccaggtcaaactctataaagcagggcaaagaccagcatttccccgtcttcatgaacgagaaggaggacatcctgtggtgcactgaaatggaaagggtgtttggcttccccgtccactacacagacgtctccaacatgagccgcttggcgaggcagagactgctgggccgatcgtggagcgtgccggtcatccgccacctcttcgctccgctgaaggaatattttgcttgtgtgtctagcggcaatagtaacgctaacagccgcgggccgagcttcagcagcggcctggtgccgttaagcttgcgcggcagccatatgggccctatggagatatacaagacagtgtctgcatggaagagacagccagtgcgggtactgagcctcttcagaaacatcgacaaggtactaaagagtttgggcttcttggaaagcggttctggttctgggggaggaacgctgaagtacgtggaagatgtcacaaatgtcgtgaggagagacgtggagaaatggggcccctttgacctggtgtacggctcgacgcagcccctaggcagctcttgtgatcgctgtcccggctggtacatgttccagttccaccggatcctgcagtatgcgctgcctcgccaggagagtcagcggcccttcttctggatattcatggacaatctgctgctgactgaggatgaccaagagacaactacccgcttccttcagacagaggctgtgaccctccaggatgtccgtggcagagactaccagaatgctatgcgggtgtggagcaacattccagggctgaagagcaagcatgcgcccctgaccccaaaggaagaagagtatctgcaagcccaagtcagaagcaggagcaagctggacgccccgaaagttgacctcctggtgaagaactgccttctcccgctgagagagtacttcaagtatttttctcaaaactcacttcctctttgataatagggatcccaagcacgcagcaatgcagctcaaaacgcttagcctagccacacccccacgggaaacagcagtgattaacctttagcaataaacgaaagtttaactaagctatactaaccccagggttggtcaatttcgtgccagccacaccctggtactgcatgcacgcaatgctagctgcccctttcccgtcctgggcaccccgagtctcccccgaccccgggtcccaggtatgctcccacctccacctgccccactcaccacctctgctagttccagacacctccgaagatgg

SEQ ID NO: 280 - RNA, 6972 nt, synthetic construct
  misc_feature 1..6972: note = V28 mRNA
  source 1..6972: mol_type = other RNA
aggactcactatttgttttcgcgcccagttgcaaaaagtgtcgacatttgcttctgacacaactgtgttcactagcaacctcaaacagacaccttaattaagccaccatgccaaaaaagaagagaaaggtaatggacaagaagtacagcatcggcctggccatcggcaccaactctgtgggctgggccgtgatcaccgacgagtacaaggtgcccagcaagaaattcaaggtgctgggcaacaccgaccggcacagcatcaagaagaacctgatcggcgccctgctgttcgacagcggagaaacagccgaggccacccggctgaagagaaccgccagaagaagatacaccagacggaagaaccggatctgctatctgcaagagatcttcagcaacgagatggccaaggtggacgacagcttcttccacagactggaagagtccttcctggtggaagaggataagaagcacgagcggcaccccatcttcggcaacatcgtggacgaggtggcctaccacgagaagtaccccaccatctaccacctgagaaagaaactggtggacagcaccgacaaggccgacctgcggctgatctatctggccctggcccacatgatcaagttccggggccacttcctgatcgagggcgacctgaaccccgacaacagcgacgtggacaagctgttcatccagctggtgcagacctacaaccagctgttcgaggaaaaccccatcaacgccagcggcgtggacgccaaggccatcctgtctgccagactgagcaagagcagacggctggaaaatctgatcgcccagctgcccggcgagaagaagaatggcctgttcggcaacctgattgccctgagcctgggcctgacccccaacttcaagagcaacttcgacctggccgaggatgccaaactgcagctgagcaaggacacctacgacgacgacctggacaacctgctggcccagatcggcgaccagtacgccgacctgtttctggccgccaagaacctgtccgacgccatcctgctgagcgacatcctgagagtgaacaccgagatcaccaaggcccccctgagcgcctctatgatcaagagatacgacgagcaccaccaggacctgaccctgctgaaagctctcgtgcggcagcagctgcctgagaagtacaaagagattttcttcgaccagagcaagaacggctacgccggctacatcgatggcggagccagccaggaagagttctacaagttcatcaagcccatcctggaaaagatggacggcaccgaggaactgctcgtgaagctgaacagagaggacctgctgcggaagcagcggaccttcgacaacggcagcatcccccaccagatccacctgggagagctgcacgccattctgcggcggcaggaagatttttacccattcctgaaggacaaccgggaaaagatcgagaagatcctgaccttccgcatcccctactacgtgggccctctggccaggggaaacagcagattcgcctggatgaccagaaagagcgaggaaaccatcaccccctggaacttcgaggaagtggtggacaagggcgccagcgcccagagcttcatcgagcggatgaccaacttcgataagaacctgcccaacgagaaggtgctgcccaagcacagcctgctgtacgagtacttcaccgtgtacaacgagctgaccaaagtgaaatacgtgaccgagggaatgagaaagcccgccttcctgagcggcgagcagaaaaaagccatcgtggacctgctgttcaagaccaaccggaaagtgaccgtgaagcagctgaaagaggactacttcaagaaaatcgagtgcttcgactccgtggaaatctccggcgtggaagatcggttcaacgcctccctgggcacataccacgatctgctgaaaattatcaaggacaaggacttcctggacaatgaggaaaacgaggacattctggaagatatcgtgctgaccctgacactgtttgaggacagagagatgatcgaggaacggctgaaaacctatgcccacctgttcgacgacaaagtgatgaagcagctgaagcggcggagatacaccggctggggcaggctgagccggaagctgatcaacggcatccgggacaagcagtccggcaagacaatcctggatttcctgaagtccgacggcttcgccaacagaaacttcatgcagctgatccacgacgacagcctgacctttaaagaggacatccagaaagcccaggtgtccggccagggcgatagcctgcacgagcacattgccaatctggccggcagccccgccattaagaagggcatcctgcagacagtgaaggtggtggacgagctcgtgaaagtgatgggccggcacaagcccgagaacatcgtgatcgaaatggccagagagaaccagaccacccagaagggacagaagaacagccgcgagagaatgaagcggatcgaagagggcatcaaagagctgggcagccagatcctgaaagaacaccccgtggaaaacacccagctgcagaacgagaagctgtacctgtactacctgcagaatgggcgggatatgtacgtggaccaggaactggacatcaaccggctgtccgactacgatgtggacgctatcgtgcctcagagctttctgaaggacgactccatcgataacaaagtgctgactcggagcgacaagaaccggggcaagagcgacaacgtgccctccgaagaggtcgtgaagaagatgaagaactactggcgccagctgctgaatgccaagctgattacccagaggaagttcgacaatctgaccaaggccgagagaggcggcctgagcgaactggataaggccggcttcatcaagagacagctggtggaaacccggcagatcacaaagcacgtggcacagatcctggactcccggatgaacactaagtacgacgagaacgacaaactgatccgggaagtgaaagtgatcaccctgaagtccaagctggtgtccgatttccggaaggatttccagttttacaaagtgcgcgagatcaacaactaccaccacgcccacgacgcctacctgaacgccgtcgtgggaaccgccctgatcaaaaagtaccctaagctggaaagcgagttcgtgtacggcgactacaaggtgtacgacgtgcggaagatgatcgccaagagcgagcaggaaatcggcaaggctaccgccaagtacttcttctacagcaacatcatgaactttttcaagaccgagattaccctggccaacggcgagatccggaagcggcctctgatcgagacaaacggcgaaacaggcgagatcgtgtgggataagggccgggactttgccaccgtgcggaaagtgctgtctatgccccaagtgaatatcgtgaaaaagaccgaggtgcagacaggcggcttcagcaaagagtctatcctgcccaagaggaacagcgacaagctgatcgccagaaagaaggactgggaccctaagaagtacggcggcttcgacagccccaccgtggcctattctgtgctggtggtggccaaagtggaaaagggcaagtccaagaaactgaagagtgtgaaagagctgctggggatcaccatcatggaaagaagcagcttcgagaagaatcccatcgactttctggaagccaagggctacaaagaagtgaaaaaggacctgatcatcaagctgcctaagtactccctgttcgagctggaaaacggccggaagagaatgctggcctctgccggcgaactgcagaagggaaacgaactggccctgccctccaaatatgtgaacttcctgtacctggccagccactatgagaagctgaagggctcccccgaggataatgagcagaaacagctgtttgtggaacagcacaaacactacctggacgagatcatcgagcagatcagcgagttctccaagagagtgatcctggccgacgctaatctggacaaggtgctgagcgcctacaacaagcacagagacaagcctatcagagagcaggccgagaatatcatccacctgtttaccctgaccaatctgggagcccctgccgccttcaagtactttgacaccaccatcgaccggaagaggtacaccagcaccaaagaggtgctggacgccaccctgatccaccagagcatcaccggcctgtacgagacacggatcgacctgtctcagctgggaggcgacgcctatccctatgacgtgcccgattatgccagcctgggcagcggctcccccaagaaaaaacgcaaggtggaagatcctaagaaaaagcggaaagtggacggcggagggccgagctctggcgcacccccaccaagtggagggtctcctgccgggtccccaacatctactgaagaaggcaccagcgaatccgcaacgcccgagtcaggccctggtacctccacagaaccatctgaaggtagtgcgcctggttccccagctggaagccctacttccaccgaagaaggcacgtcaaccgaaccaagtgaaggatctgcccctgggaccagcactgaaccatctgagcggacactggtgaccttcaaggatgtatttgtggacttcaccagggaggagtggaagctgctggacactgctcagcagatcgtgtacagaaatgtgatgctggagaactataagaacctggtttccttgggttatcagcttactaagccagatgtgatcctccggttggagaagggagaagagcccagcggcagcgagacccccggtaccagcgagggcggccctagcagcggcgcccctccccctagcggcggcagccctgccggatcccctacaagcaccgaagaaggcacaagcgagtccgctacccctgagtccggccctggcacctccacagagcctagcgagggatccgctcctggatcccctgccggaagccctacctccaccgaggagggcacaagcaccgagccttccgagggcagcgcccccggaacaagcaccgaacctagcgagagcgccacccccgagagcatgttcgaaaccgtgcctgtgtggaggagacagccagtccgggtgctgtccctttttgaagacatcaagaaagagctgacgagtttgggctttttggaaagtggttctgacccgggacaactgaagcatgtggttgatgtcacagacacagtgaggaaggatgtggaggagtggggacccttcgatcttgtgtacggcgccacacctcccctgggccacacctgtgaccgtcctcccagctggtacctgttccagttccaccggctcctgcagtacgcacggcccaagccaggcagccccaggcccttcttctggatgttcgtggacaatctggtgctgaacaaggaagacctggacgtcgcatctcgcttcctggagatggagccagtcaccatcccagatgtccacggcggatccttgcagaatgctgtccgcgtgtggagcaacatcccagccataaggagcagcaggcactgggctctggtttcggaagaagaattgtccctgctggcccagaacaagcagagctcgaagctcgcggccaagtggcccaccaagctggtgaagaactgctttctccccctaagagaatatttcaagtatttttcaacagaactcacttcctctttatctagcggcaatagtaacgctaacagccgcgggccgagcttcagcagcggcctggtgccgttaagcttgcgcggcagccatatgaaccatgaccaggaatttgaccccccaaaggtttacccacctgtgccagctgagaagaggaagcccatccgcgtgctgtctctctttgatgggattgctacagggctcctggtgctgaaggacctgggcatccaagtggaccgctacattgcctccgaggtgtgtgaggactccatcacggtgggcatggtgcggcaccagggaaagatcatgtacgtcggggacgtccgcagcgtcacacagaagcatatccaggagtggggcccattcgacctggtgattggaggcagtccctgcaatgacctctccattgtcaaccctgcccgcaagggactttatgagggtactggccgcctcttctttgagttctaccgcctcctgcatgatgcgcggcccaaggagggagatgatcgccccttcttctggctctttgagaatgtggtggccatgggcgttagtgacaagagggacatctcgcgatttcttgagtctaaccccgtgatgattgacgccaaagaagtgtctgctgcacacagggcccgttacttctggggtaaccttcctggcatgaacaggcctttggcatccactgtgaatgataagctggagctgcaagagtgtctggagcacggcagaatagccaagttcagcaaagtgaggaccattaccaccaggtcaaactctataaagcagggcaaagaccagcatttccccgtcttcatgaacgagaaggaggacatcctgtggtgcactgaaatggaaagggtgtttggcttccccgtccactacacagacgtctccaacatgagccgcttggcgaggcagagactgctgggccgatcgtggagcgtgccggtcatccgccacctcttcgctccgctgaaggaatattttgcttgtgtgctcgagtaatgagatcccaagcacgcagcaatgcagctcaaaacgcttagcctagccacacccccacgggaaacagcagtgattaacctttagcaataaacgaaagtttaactaagctatactaaccccagggttggtcaatttcgtgccagccacaccctggtactgcatgcacgcaatgctagctgcccctttcccgtcctgggcaccccgagtctcccccgaccccgggtcccaggtatgctcccacctccacctgccccactcaccacctctgctagttccagacacctccgagacgagg

SEQ ID NO: 281 - RNA, 6978 nt, synthetic construct
  misc_feature 1..6978: note = V29 mRNA
  source 1..6978: mol_type = other RNA
aggactcactatttgttttcgcgcccagttgcaaaaagtgtcgacatttgcttctgacacaactgtgttcactagcaacctcaaacagacaccttaattaagccaccatgccaaaaaagaagagaaaggtaatggacaagaagtacagcatcggcctggccatcggcaccaactctgtgggctgggccgtgatcaccgacgagtacaaggtgcccagcaagaaattcaaggtgctgggcaacaccgaccggcacagcatcaagaagaacctgatcggcgccctgctgttcgacagcggagaaacagccgaggccacccggctgaagagaaccgccagaagaagatacaccagacggaagaaccggatctgctatctgcaagagatcttcagcaacgagatggccaaggtggacgacagcttcttccacagactggaagagtccttcctggtggaagaggataagaagcacgagcggcaccccatcttcggcaacatcgtggacgaggtggcctaccacgagaagtaccccaccatctaccacctgagaaagaaactggtggacagcaccgacaaggccgacctgcggctgatctatctggccctggcccacatgatcaagttccggggccacttcctgatcgagggcgacctgaaccccgacaacagcgacgtggacaagctgttcatccagctggtgcagacctacaaccagctgttcgaggaaaaccccatcaacgccagcggcgtggacgccaaggccatcctgtctgccagactgagcaagagcagacggctggaaaatctgatcgcccagctgcccggcgagaagaagaatggcctgttcggcaacctgattgccctgagcctgggcctgacccccaacttcaagagcaacttcgacctggccgaggatgccaaactgcagctgagcaaggacacctacgacgacgacctggacaacctgctggcccagatcggcgaccagtacgccgacctgtttctggccgccaagaacctgtccgacgccatcctgctgagcgacatcctgagagtgaacaccgagatcaccaaggcccccctgagcgcctctatgatcaagagatacgacgagcaccaccaggacctgaccctgctgaaagctctcgtgcggcagcagctgcctgagaagtacaaagagattttcttcgaccagagcaagaacggctacgccggctacatcgatggcggagccagccaggaagagttctacaagttcatcaagcccatcctggaaaagatggacggcaccgaggaactgctcgtgaagctgaacagagaggacctgctgcggaagcagcggaccttcgacaacggcagcatcccccaccagatccacctgggagagctgcacgccattctgcggcggcaggaagatttttacccattcctgaaggacaaccgggaaaagatcgagaagatcctgaccttccgcatcccctactacgtgggccctctggccaggggaaacagcagattcgcctggatgaccagaaagagcgaggaaaccatcaccccctggaacttcgaggaagtggtggacaagggcgccagcgcccagagcttcatcgagcggatgaccaacttcgataagaacctgcccaacgagaaggtgctgcccaagcacagcctgctgtacgagtacttcaccgtgtacaacgagctgaccaaagtgaaatacgtgaccgagggaatgagaaagcccgccttcctgagcggcgagcagaaaaaagccatcgtggacctgctgttcaagaccaaccggaaagtgaccgtgaagcagctgaaagaggactacttcaagaaaatcgagtgcttcgactccgtggaaatctccggcgtggaagatcggttcaacgcctccctgggcacataccacgatctgctgaaaattatcaaggacaaggacttcctggacaatgaggaaaacgaggacattctggaagatatcgtgctgaccctgacactgtttgaggacagagagatgatcgaggaacggctgaaaacctatgcccacctgttcgacgacaaagtgatgaagcagctgaagcggcggagatacaccggctggggcaggctgagccggaagctgatcaacggcatccgggacaagcagtccggcaagacaatcctggatttcctgaagtccgacggcttcgccaacagaaacttcatgcagctgatccacgacgacagcctgacctttaaagaggacatccagaaagcccaggtgtccggccagggcgatagcctgcacgagcacattgccaatctggccggcagccccgccattaagaagggcatcctgcagacagtgaaggtggtggacgagctcgtgaaagtgatgggccggcacaagcccgagaacatcgtgatcgaaatggccagagagaaccagaccacccagaagggacagaagaacagccgcgagagaatgaagcggatcgaagagggcatcaaagagctgggcagccagatcctgaaagaacaccccgtggaaaacacccagctgcagaacgagaagctgtacctgtactacctgcagaatgggcgggatatgtacgtggaccaggaactggacatcaaccggctgtccgactacgatgtggacgctatcgtgcctcagagctttctgaaggacgactccatcgataacaaagtgctgactcggagcgacaagaaccggggcaagagcgacaacgtgccctccgaagaggtcgtgaagaagatgaagaactactggcgccagctgctgaatgccaagctgattacccagaggaagttcgacaatctgaccaaggccgagagaggcggcctgagcgaactggataaggccggcttcatcaagagacagctggtggaaacccggcagatcacaaagcacgtggcacagatcctggactcccggatgaacactaagtacgacgagaacgacaaactgatccgggaagtgaaagtgatcaccctgaagtccaagctggtgtccgatttccggaaggatttccagttttacaaagtgcgcgagatcaacaactaccaccacgcccacgacgcctacctgaacgccgtcgtgggaaccgccctgatcaaaaagtaccctaagctggaaagcgagttcgtgtacggcgactacaaggtgtacgacgtgcggaagatgatcgccaagagcgagcaggaaatcggcaaggctaccgccaagtacttcttctacagcaacatcatgaactttttcaagaccgagattaccctggccaacggcgagatccggaagcggcctctgatcgagacaaacggcgaaacaggcgagatcgtgtgggataagggccgggactttgccaccgtgcggaaagtgctgtctatgccccaagtgaatatcgtgaaaaagaccgaggtgcagacaggcggcttcagcaaagagtctatcctgcccaagaggaacagcgacaagctgatcgccagaaagaaggactgggaccctaagaagtacggcggcttcgacagccccaccgtggcctattctgtgctggtggtggccaaagtggaaaagggcaagtccaagaaactgaagagtgtgaaagagctgctggggatcaccatcatggaaagaagcagcttcgagaagaatcccatcgactttctggaagccaagggctacaaagaagtgaaaaaggacctgatcatcaagctgcctaagtactccctgttcgagctggaaaacggccggaagagaatgctggcctctgccggcgaactgcagaagggaaacgaactggccctgccctccaaatatgtgaacttcctgtacctggccagccactatgagaagctgaagggctcccccgaggataatgagcagaaacagctgtttgtggaacagcacaaacactacctggacgagatcatcgagcagatcagcgagttctccaagagagtgatcctggccgacgctaatctggacaaggtgctgagcgcctacaacaagcacagagacaagcctatcagagagcaggccgagaatatcatccacctgtttaccctgaccaatctgggagcccctgccgccttcaagtactttgacaccaccatcgaccggaagaggtacaccagcaccaaagaggtgctggacgccaccctgatccaccagagcatcaccggcctgtacgagacacggatcgacctgtctcagctgggaggcgacgcctatccctatgacgtgcccgattatgccagcctgggcagcggctcccccaagaaaaaacgcaaggtggaagatcctaagaaaaagcggaaagtggacggcggagggccgagctctggcgcacccccaccaagtggagggtctcctgccgggtccccaacatctactgaagaaggcaccagcgaatccgcaacgcccgagtcaggccctggtacctccacagaaccatctgaaggtagtgcgcctggttccccagctggaagccctacttccaccgaagaaggcacgtcaaccgaaccaagtgaaggatctgcccctgggaccagcactgaaccatctgagcggacactcgagctgttccgcgacgtggccattgtgttctctcaagaggaatggcagtggctggcccctgctcagagagatctctaccgcgacgttatgctggagacatactccaatctcgtgtccctcggcctggccgtgtccaaacctgatgtgatcagcttcctcgagcagggaaaagaaccttggatgagcggcagcgagacccccggtaccagcgagggcggccctagcagcggcgcccctccccctagcggcggcagccctgccggatcccctacaagcaccgaagaaggcacaagcgagtccgctacccctgagtccggccctggcacctccacagagcctagcgagggatccgctcctggatcccctgccggaagccctacctccaccgaggagggcacaagcaccgagccttccgagggcagcgcccccggaacaagcaccgaacctagcgagagcgccacccccgagagcatgttcgaaaccgtgcctgtgtggaggagacagccagtccgggtgctgtccctttttgaagacatcaagaaagagctgacgagtttgggctttttggaaagtggttctgacccgggacaactgaagcatgtggttgatgtcacagacacagtgaggaaggatgtggaggagtggggacccttcgatcttgtgtacggcgccacacctcccctgggccacacctgtgaccgtcctcccagctggtacctgttccagttccaccggctcctgcagtacgcacggcccaagccaggcagccccaggcccttcttctggatgttcgtggacaatctggtgctgaacaaggaagacctggacgtcgcatctcgcttcctggagatggagccagtcaccatcccagatgtccacggcggatccttgcagaatgctgtccgcgtgtggagcaacatcccagccataaggagcagcaggcactgggctctggtttcggaagaagaattgtccctgctggcccagaacaagcagagctcgaagctcgcggccaagtggcccaccaagctggtgaagaactgctttctccccctaagagaatatttcaagtatttttcaacagaactcacttcctctttatctagcggcaatagtaacgctaacagccgcgggccgagcttcagcagcggcctggtgccgttaagcttgcgcggcagccatatgaaccatgaccaggaatttgaccccccaaaggtttacccacctgtgccagctgagaagaggaagcccatccgcgtgctgtctctctttgatgggattgctacagggctcctggtgctgaaggacctgggcatccaagtggaccgctacattgcctccgaggtgtgtgaggactccatcacggtgggcatggtgcggcaccagggaaagatcatgtacgtcggggacgtccgcagcgtcacacagaagcatatccaggagtggggcccattcgacctggtgattggaggcagtccctgcaatgacctctccattgtcaaccctgcccgcaagggactttatgagggtactggccgcctcttctttgagttctaccgcctcctgcatgatgcgcggcccaaggagggagatgatcgccccttcttctggctctttgagaatgtggtggccatgggcgttagtgacaagagggacatctcgcgatttcttgagtctaaccccgtgatgattgacgccaaagaagtgtctgctgcacacagggcccgttacttctggggtaaccttcctggcatgaacaggcctttggcatccactgtgaatgataagctggagctgcaagagtgtctggagcacggcagaatagccaagttcagcaaagtgaggaccattaccaccaggtcaaactctataaagcagggcaaagaccagcatttccccgtcttcatgaacgagaaggaggacatcctgtggtgcactgaaatggaaagggtgtttggcttccccgtccactacacagacgtctccaacatgagccgcttggcgaggcagagactgctgggccgatcgtggagcgtgccggtcatccgccacctcttcgctccgctgaaggaatattttgcttgtgtgctcgagtaatgagatcccaagcacgcagcaatgcagctcaaaacgcttagcctagccacacccccacgggaaacagcagtgattaacctttagcaataaacgaaagtttaactaagctatactaaccccagggttggtcaatttcgtgccagccacaccctggtactgcatgcacgcaatgctagctgcccctttcccgtcctgggcaccccgagtctcccccgaccccgggtcccaggtatgctcccacctccacctgccccactcaccacctctgctagttccagacacctccgagacgagg

SEQ ID NO: 282 - RNA, 6978 nt, synthetic construct
  misc_feature 1..6978: note = V30 mRNA
  source 1..6978: mol_type = other RNA
aggactcactatttgttttcgcgcccagttgcaaaaagtgtcgacatttgcttctgacacaactgtgttcactagcaacctcaaacagacaccttaattaagccaccatgccaaaaaagaagagaaaggtaatggacaagaagtacagcatcggcctggccatcggcaccaactctgtgggctgggccgtgatcaccgacgagtacaaggtgcccagcaagaaattcaaggtgctgggcaacaccgaccggcacagcatcaagaagaacctgatcggcgccctgctgttcgacagcggagaaacagccgaggccacccggctgaagagaaccgccagaagaagatacaccagacggaagaaccggatctgctatctgcaagagatcttcagcaacgagatggccaaggtggacgacagcttcttccacagactggaagagtccttcctggtggaagaggataagaagcacgagcggcaccccatcttcggcaacatcgtggacgaggtggcctaccacgagaagtaccccaccatctaccacctgagaaagaaactggtggacagcaccgacaaggccgacctgcggctgatctatctggccctggcccacatgatcaagttccggggccacttcctgatcgagggcgacctgaaccccgacaacagcgacgtggacaagctgttcatccagctggtgcagacctacaaccagctgttcgaggaaaaccccatcaacgccagcggcgtggacgccaaggccatcctgtctgccagactgagcaagagcagacggctggaaaatctgatcgcccagctgcccggcgagaagaagaatggcctgttcggcaacctgattgccctgagcctgggcctgacccccaacttcaagagcaacttcgacctggccgaggatgccaaactgcagctgagcaaggacacctacgacgacgacctggacaacctgctggcccagatcggcgaccagtacgccgacctgtttctggccgccaagaacctgtccgacgccatcctgctgagcgacatcctgagagtgaacaccgagatcaccaaggcccccctgagcgcctctatgatcaagagatacgacgagcaccaccaggacctgaccctgctgaaagctctcgtgcggcagcagctgcctgagaagtacaaagagattttcttcgaccagagcaagaacggctacgccggctacatcgatggcggagccagccaggaagagttctacaagttcatcaagcccatcctggaaaagatggacggcaccgaggaactgctcgtgaagctgaacagagaggacctgctgcggaagcagcggaccttcgacaacggcagcatcccccaccagatccacctgggagagctgcacgccattctgcggcggcaggaagatttttacccattcctgaaggacaaccgggaaaagatcgagaagatcctgaccttccgcatcccctactacgtgggccctctggccaggggaaacagcagattcgcctggatgaccagaaagagcgaggaaaccatcaccccctggaacttcgaggaagtggtggacaagggcgccagcgcccagagcttcatcgagcggatgaccaacttcgataagaacctgcccaacgagaaggtgctgcccaagcacagcctgctgtacgagtacttcaccgtgtacaacgagctgaccaaagtgaaatacgtgaccgagggaatgagaaagcccgccttcctgagcggcgagcagaaaaaagccatcgtggacctgctgttcaagaccaaccggaaagtgaccgtgaagcagctgaaagaggactacttcaagaaaatcgagtgcttcgactccgtggaaatctccggcgtggaagatcggttcaacgcctccctgggcacataccacgatctgctgaaaattatcaaggacaaggacttcctggacaatgaggaaaacgaggacattctggaagatatcgtgctgaccctgacactgtttgaggacagagagatgatcgaggaacggctgaaaacctatgcccacctgttcgacgacaaagtgatgaagcagctgaagcggcggagatacaccggctggggcaggctgagccggaagctgatcaacggcatccgggacaagcagtccggcaagacaatcctggatttcctgaagtccgacggcttcgccaacagaaacttcatgcagctgatccacgacgacagcctgacctttaaagaggacatccagaaagcccaggtgtccggccagggcgatagcctgcacgagcacattgccaatctggccggcagccccgccattaagaagggcatcctgcagacagtgaaggtggtggacgagctcgtgaaagtgatgggccggcacaagcccgagaacatcgtgatcgaaatggccagagagaaccagaccacccagaagggacagaagaacagccgcgagagaatgaagcggatcgaagagggcatcaaagagctgggcagccagatcctgaaagaacaccccgtggaaaacacccagctgcagaacgagaagctgtacctgtactacctgcagaatgggcgggatatgtacgtggaccaggaactggacatcaaccggctgtccgactacgatgtggacgctatcgtgcctcagagctttctgaaggacgactccatcgataacaaagtgctgactcggagcgacaagaaccggggcaagagcgacaacgtgccctccgaagaggtcgtgaagaagatgaagaactactggcgccagctgctgaatgccaagctgattacccagaggaagttcgacaatctgaccaaggccgagagaggcggcctgagcgaactggataaggccggcttcatcaagagacagctggtggaaacccggcagatcacaaagcacgtggcacagatcctggactcccggatgaacactaagtacgacgagaacgacaaactgatccgggaagtgaaagtgatcaccctgaagtccaagctggtgtccgatttccggaaggatttccagttttacaaagtgcgcgagatcaacaactaccaccacgcccacgacgcctacctgaacgccgtcgtgggaaccgccctgatcaaaaagtaccctaagctggaaagcgagttcgtgtacggcgactacaaggtgtacgacgtgcggaagatgatcgccaagagcgagcaggaaatcggcaaggctaccgccaagtacttcttctacagcaacatcatgaactttttcaagaccgagattaccctggccaacggcgagatccggaagcggcctctgatcgagacaaacggcgaaacaggcgagatcgtgtgggataagggccgggactttgccaccgtgcggaaagtgctgtctatgccccaagtgaatatcgtgaaaaagaccgaggtgcagacaggcggcttcagcaaagagtctatcctgcccaagaggaacagcgacaagctgatcgccagaaagaaggactgggaccctaagaagtacggcggcttcgacagccccaccgtggcctattctgtgctggtggtggccaaagtggaaaagggcaagtccaagaaactgaagagtgtgaaagagctgctggggatcaccatcatggaaagaagcagcttcgagaagaatcccatcgactttctggaagccaagggctacaaagaagtgaaaaaggacctgatcatcaagctgcctaagtactccctgttcgagctggaaaacggccggaagagaatgctggcctctgccggcgaactgcagaagggaaacgaactggccctgccctccaaatatgtgaacttcctgtacctggccagccactatgagaagctgaagggctcccccgaggataatgagcagaaacagctgtttgtggaacagcacaaacactacctggacgagatcatcgagcagatcagcgagttctccaagagagtgatcctggccgacgctaatctggacaaggtgctgagcgcctacaacaagcacagagacaagcctatcagagagcaggccgagaatatcatccacctgtttaccctgaccaatctgggagcccctgccgccttcaagtactttgacaccaccatcgaccggaagaggtacaccagcaccaaagaggtgctggacgccaccctgatccaccagagcatcaccggcctgtacgagacacggatcgacctgtctcagctgggaggcgacgcctatccctatgacgtgcccgattatgccagcctgggcagcggctcccccaagaaaaaacgcaaggtggaagatcctaagaaaaagcggaaagtggacggcggagggccgagctctggcgcacccccaccaagtggagggtctcctgccgggtccccaacatctactgaagaaggcaccagcgaatccgcaacgcccgagtcaggccctggtacctccacagaaccatctgaaggtagtgcgcctggttccccagctggaagccctacttccaccgaagaaggcacgtcaaccgaaccaagtgaaggatctgcccctgggaccagcactgaaccatctgagcggacactcatggcctttgaggacgtcgccgtgtatttttcccaagaagaatggggactgctcgacactgcccagagagccctgtatcgcagagtcatgctggacaacttcgccctggtggcctccctgggcctgtctacaagcagacccagagtggtcattcagctggaaagaggcgaggaaccctgggtcagcggcagcgagacccccggtaccagcgagggcggccctagcagcggcgcccctccccctagcggcggcagccctgccggatcccctacaagcaccgaagaaggcacaagcgagtccgctacccctgagtccggccctggcacctccacagagcctagcgagggatccgctcctggatcccctgccggaagccctacctccaccgaggagggcacaagcaccgagccttccgagggcagcgcccccggaacaagcaccgaacctagcgagagcgccacccccgagagcatgttcgaaaccgtgcctgtgtggaggagacagccagtccgggtgctgtccctttttgaagacatcaagaaagagctgacgagtttgggctttttggaaagtggttctgacccgggacaactgaagcatgtggttgatgtcacagacacagtgaggaaggatgtggaggagtggggacccttcgatcttgtgtacggcgccacacctcccctgggccacacctgtgaccgtcctcccagctggtacctgttccagttccaccggctcctgcagtacgcacggcccaagccaggcagccccaggcccttcttctggatgttcgtggacaatctggtgctgaacaaggaagacctggacgtcgcatctcgcttcctggagatggagccagtcaccatcccagatgtccacggcggatccttgcagaatgctgtccgcgtgtggagcaacatcccagccataaggagcagcaggcactgggctctggtttcggaagaagaattgtccctgctggcccagaacaagcagagctcgaagctcgcggccaagtggcccaccaagctggtgaagaactgctttctccccctaagagaatatttcaagtatttttcaacagaactcacttcctctttatctagcggcaatagtaacgctaacagccgcgggccgagcttcagcagcggcctggtgccgttaagcttgcgcggcagccatatgaaccatgaccaggaatttgaccccccaaaggtttacccacctgtgccagctgagaagaggaagcccatccgcgtgctgtctctctttgatgggattgctacagggctcctggtgctgaaggacctgggcatccaagtggaccgctacattgcctccgaggtgtgtgaggactccatcacggtgggcatggtgcggcaccagggaaagatcatgtacgtcggggacgtccgcagcgtcacacagaagcatatccaggagtggggcccattcgacctggtgattggaggcagtccctgcaatgacctctccattgtcaaccctgcccgcaagggactttatgagggtactggccgcctcttctttgagttctaccgcctcctgcatgatgcgcggcccaaggagggagatgatcgccccttcttctggctctttgagaatgtggtggccatgggcgttagtgacaagagggacatctcgcgatttcttgagtctaaccccgtgatgattgacgccaaagaagtgtctgctgcacacagggcccgttacttctggggtaaccttcctggcatgaacaggcctttggcatccactgtgaatgataagctggagctgcaagagtgtctggagcacggcagaatagccaagttcagcaaagtgaggaccattaccaccaggtcaaactctataaagcagggcaaagaccagcatttccccgtcttcatgaacgagaaggaggacatcctgtggtgcactgaaatggaaagggtgtttggcttccccgtccactacacagacgtctccaacatgagccgcttggcgaggcagagactgctgggccgatcgtggagcgtgccggtcatccgccacctcttcgctccgctgaaggaatattttgcttgtgtgctcgagtaatgagatcccaagcacgcagcaatgcagctcaaaacgcttagcctagccacacccccacgggaaacagcagtgattaacctttagcaataaacgaaagtttaactaagctatactaaccccagggttggtcaatttcgtgccagccacaccctggtactgcatgcacgcaatgctagctgcccctttcccgtcctgggcaccccgagtctcccccgaccccgggtcccaggtatgctcccacctccacctgccccactcaccacctctgctagttccagacacctccgagacgagg

SEQ ID NO: 283 - RNA, 7011 nt, synthetic construct
  misc_feature 1..7011: note = V31 mRNA
  source 1..7011: mol_type = other RNA
aggactcactatttgttttcgcgcccagttgcaaaaagtgtcgacatttgcttctgacacaactgtgttcactagcaacctcaaacagacaccttaattaagccaccatgccaaaaaagaagagaaaggtaatggacaagaagtacagcatcggcctggccatcggcaccaactctgtgggctgggccgtgatcaccgacgagtacaaggtgcccagcaagaaattcaaggtgctgggcaacaccgaccggcacagcatcaagaagaacctgatcggcgccctgctgttcgacagcggagaaacagccgaggccacccggctgaagagaaccgccagaagaagatacaccagacggaagaaccggatctgctatctgcaagagatcttcagcaacgagatggccaaggtggacgacagcttcttccacagactggaagagtccttcctggtggaagaggataagaagcacgagcggcaccccatcttcggcaacatcgtggacgaggtggcctaccacgagaagtaccccaccatctaccacctgagaaagaaactggtggacagcaccgacaaggccgacctgcggctgatctatctggccctggcccacatgatcaagttccggggccacttcctgatcgagggcgacctgaaccccgacaacagcgacgtggacaagctgttcatccagctggtgcagacctacaaccagctgttcgaggaaaaccccatcaacgccagcggcgtggacgccaaggccatcctgtctgccagactgagcaagagcagacggctggaaaatctgatcgcccagctgcccggcgagaagaagaatggcctgttcggcaacctgattgccctgagcctgggcctgacccccaacttcaagagcaacttcgacctggccgaggatgccaaactgcagctgagcaaggacacctacgacgacgacctggacaacctgctggcccagatcggcgaccagtacgccgacctgtttctggccgccaagaacctgtccgacgccatcctgctgagcgacatcctgagagtgaacaccgagatcaccaaggcccccctgagcgcctctatgatcaagagatacgacgagcaccaccaggacctgaccctgctgaaagctctcgtgcggcagcagctgcctgagaagtacaaagagattttcttcgaccagagcaagaacggctacgccggctacatcgatggcggagccagccaggaagagttctacaagttcatcaagcccatcctggaaaagatggacggcaccgaggaactgctcgtgaagctgaacagagaggacctgctgcggaagcagcggaccttcgacaacggcagcatcccccaccagatccacctgggagagctgcacgccattctgcggcggcaggaagatttttacccattcctgaaggacaaccgggaaaagatcgagaagatcctgaccttccgcatcccctactacgtgggccctctggccaggggaaacagcagattcgcctggatgaccagaaagagcgaggaaaccatcaccccctggaacttcgaggaagtggtggacaagggcgccagcgcccagagcttcatcgagcggatgaccaacttcgataagaacctgcccaacgagaaggtgctgcccaagcacagcctgctgtacgagtacttcaccgtgtacaacgagctgaccaaagtgaaatacgtgaccgagggaatgagaaagcccgccttcctgagcggcgagcagaaaaaagccatcgtggacctgctgttcaagaccaaccggaaagtgaccgtgaagcagctgaaagaggactacttcaagaaaatcgagtgcttcgactccgtggaaatctccggcgtggaagatcggttcaacgcctccctgggcacataccacgatctgctgaaaattatcaaggacaaggacttcctggacaatgaggaaaacgaggacattctggaagatatcgtgctgaccctgacactgtttgaggacagagagatgatcgaggaacggctgaaaacctatgcccacctgttcgacgacaaagtgatgaagcagctgaagcggcggagatacaccggctggggcaggctgagccggaagctgatcaacggcatccgggacaagcagtccggcaagacaatcctggatttcctgaagtccgacggcttcgccaacagaaacttcatgcagctgatccacgacgacagcctgacctttaaagaggacatccagaaagcccaggtgtccggccagggcgatagcctgcacgagcacattgccaatctggccggcagccccgccattaagaagggcatcctgcagacagtgaaggtggtggacgagctcgtgaaagtgatgggccggcacaagcccgagaacatcgtgatcgaaatggccagagagaaccagaccacccagaagggacagaagaacagccgcgagagaatgaagcggatcgaagagggcatcaaagagctgggcagccagatcctgaaagaacaccccgtggaaaacacccagctgcagaacgagaagctgtacctgtactacctgcagaatgggcgggatatgtacgtggaccaggaactggacatcaaccggctgtccgactacgatgtggacgctatcgtgcctcagagctttctgaaggacgactccatcgataacaaagtgctgactcggagcgacaagaaccggggcaagagcgacaacgtgccctccgaagaggtcgtgaagaagatgaagaactactggcgccagctgctgaatgccaagctgattacccagaggaagttcgacaatctgaccaaggccgagagaggcggcctgagcgaactggataaggccggcttcatcaagagacagctggtggaaacccggcagatcacaaagcacgtggcacagatcctggactcccggatgaacactaagtacgacgagaacgacaaactgatccgggaagtgaaagtgatcaccctgaagtccaagctggtgtccgatttccggaaggatttccagttttacaaagtgcgcgagatcaacaactaccaccacgcccacgacgcctacctgaacgccgtcgtgggaaccgccctgatcaaaaagtaccctaagctggaaagcgagttcgtgtacggcgactacaaggtgtacgacgtgcggaagatgatcgccaagagcgagcaggaaatcggcaaggctaccgccaagtacttcttctacagcaacatcatgaactttttcaagaccgagattaccctggccaacggcgagatccggaagcggcctctgatcgagacaaacggcgaaacaggcgagatcgtgtgggataagggccgggactttgccaccgtgcggaaagtgctgtctatgccccaagtgaatatcgtgaaaaagaccgaggtgcagacaggcggcttcagcaaagagtctatcctgcccaagaggaacagcgacaagctgatcgccagaaagaaggactgggaccctaagaagtacggcggcttcgacagccccaccgtggcctattctgtgctggtggtggccaaagtggaaaagggcaagtccaagaaactgaagagtgtgaaagagctgctggggatcaccatcatggaaagaagcagcttcgagaagaatcccatcgactttctggaagccaagggctacaaagaagtgaaaaaggacctgatcatcaagctgcctaagtactccctgttcgagctggaaaacggccggaagagaatgctggcctctgccggcgaactgcagaagggaaacgaactggccctgccctccaaatatgtgaacttcctgtacctggccagccactatgagaagctgaagggctcccccgaggataatgagcagaaacagctgtttgtggaacagcacaaacactacctggacgagatcatcgagcagatcagcgagttctccaagagagtgatcctggccgacgctaatctggacaaggtgctgagcgcctacaacaagcacagagacaagcctatcagagagcaggccgagaatatcatccacctgtttaccctgaccaatctgggagcccctgccgccttcaagtactttgacaccaccatcgaccggaagaggtacaccagcaccaaagaggtgctggacgccaccctgatccaccagagcatcaccggcctgtacgagacacggatcgacctgtctcagctgggaggcgacgcctatccctatgacgtgcccgattatgccagcctgggcagcggctcccccaagaaaaaacgcaaggtggaagatcctaagaaaaagcggaaagtggacggcggagggccgagctctggcgcacccccaccaagtggagggtctcctgccgggtccccaacatctactgaagaaggcaccagcgaatccgcaacgcccgagtcaggccctggtacctccacagaaccatctgaaggtagtgcgcctggttccccagctggaagccctacttccaccgaagaaggcacgtcaaccgaaccaagtgaaggatctgcccctgggaccagcactgaaccatctgagggcagcggcagcgagacccccggtaccagcgagagcgccacccccgagagccggacactggtgaccttcaaggatgtatttgtggacttcaccagggaggagtggaagctgctggacactgctcagcagatcgtgtacagaaatgtgatgctggagaactataagaacctggtttccttgggttatcagcttactaagccagatgtgatcctccggttggagaagggagaagagcccagcggcagcgagacccccggtaccagcgagagcgctacacccgaatccggccccggcagccccgccggcagccctacaagcaccgaggagggcacctccgaatccgccacccctgagagcggacccggcagcgagcctgccacaagcggcagcgagacacctggaacaagcgagagcgccacacctgaaagcggccccggaacatccaccgagcctagcgagggcagcgcccctggcacaagcacagagccttccgagagcgccacccccgagagcatgttcgaaaccgtgcctgtgtggaggagacagccagtccgggtgctgtccctttttgaagacatcaagaaagagctgacgagtttgggctttttggaaagtggttctgacccgggacaactgaagcatgtggttgatgtcacagacacagtgaggaaggatgtggaggagtggggacccttcgatcttgtgtacggcgccacacctcccctgggccacacctgtgaccgtcctcccagctggtacctgttccagttccaccggctcctgcagtacgcacggcccaagccaggcagccccaggcccttcttctggatgttcgtggacaatctggtgctgaacaaggaagacctggacgtcgcatctcgcttcctggagatggagccagtcaccatcccagatgtccacggcggatccttgcagaatgctgtccgcgtgtggagcaacatcccagccataaggagcagcaggcactgggctctggtttcggaagaagaattgtccctgctggcccagaacaagcagagctcgaagctcgcggccaagtggcccaccaagctggtgaagaactgctttctccccctaagagaatatttcaagtatttttcaacagaactcacttcctctttatctagcggcaatagtaacgctaacagccgcgggccgagcttcagcagcggcctggtgccgttaagcttgcgcggcagccatatgaaccatgaccaggaatttgaccccccaaaggtttacccacctgtgccagctgagaagaggaagcccatccgcgtgctgtctctctttgatgggattgctacagggctcctggtgctgaaggacctgggcatccaagtggaccgctacattgcctccgaggtgtgtgaggactccatcacggtgggcatggtgcggcaccagggaaagatcatgtacgtcggggacgtccgcagcgtcacacagaagcatatccaggagtggggcccattcgacctggtgattggaggcagtccctgcaatgacctctccattgtcaaccctgcccgcaagggactttatgagggtactggccgcctcttctttgagttctaccgcctcctgcatgatgcgcggcccaaggagggagatgatcgccccttcttctggctctttgagaatgtggtggccatgggcgttagtgacaagagggacatctcgcgatttcttgagtctaaccccgtgatgattgacgccaaagaagtgtctgctgcacacagggcccgttacttctggggtaaccttcctggcatgaacaggcctttggcatccactgtgaatgataagctggagctgcaagagtgtctggagcacggcagaatagccaagttcagcaaagtgaggaccattaccaccaggtcaaactctataaagcagggcaaagaccagcatttccccgtcttcatgaacgagaaggaggacatcctgtggtgcactgaaatggaaagggtgtttggcttccccgtccactacacagacgtctccaacatgagccgcttggcgaggcagagactgctgggccgatcgtggagcgtgccggtcatccgccacctcttcgctccgctgaaggaatattttgcttgtgtgctcgagtaatgagatcccaagcacgcagcaatgcagctcaaaacgcttagcctagccacacccccacgggaaacagcagtgattaacctttagcaataaacgaaagtttaactaagctatactaaccccagggttggtcaatttcgtgccagccacaccctggtactgcatgcacgcaatgctagctgcccctttcccgtcctgggcaccccgagtctcccccgaccccgggtcccaggtatgctcccacctccacctgccccactcaccacctctgctagttccagacacctccgagacgagg

SEQ ID NO: 284 - RNA, 7018 nt, synthetic construct
  misc_feature 1..7018: note = V32 mRNA
  source 1..7018: mol_type = other RNA
aggactcactatttgttttcgcgcccagttgcaaaaagtgtcgacatttgcttctgacacaactgtgttcactagcaacctcaaacagacaccgccaccatggtccctgctgctaagagagtgaaactggatggatccgacaagaagtacagcatcggcctggccatcggcaccaactctgtgggctgggccgtgatcaccgacgagtacaaggtgcccagcaagaaattcaaggtgctgggcaacaccgaccggcacagcatcaagaagaacctgatcggcgccctgctgttcgacagcggagaaacagccgaggccacccggctgaagagaaccgccagaagaagatacaccagacggaagaaccggatctgctatctgcaagagatcttcagcaacgagatggccaaggtggacgacagcttcttccacagactggaagagtccttcctggtggaagaggataagaagcacgagcggcaccccatcttcggcaacatcgtggacgaggtggcctaccacgagaagtaccccaccatctaccacctgagaaagaaactggtggacagcaccgacaaggccgacctgcggctgatctatctggccctggcccacatgatcaagttccggggccacttcctgatcgagggcgacctgaaccccgacaacagcgacgtggacaagctgttcatccagctggtgcagacctacaaccagctgttcgaggaaaaccccatcaacgccagcggcgtggacgccaaggccatcctgtctgccagactgagcaagagcagacggctggaaaatctgatcgcccagctgcccggcgagaagaagaatggcctgttcggcaacctgattgccctgagcctgggcctgacccccaacttcaagagcaacttcgacctggccgaggatgccaaactgcagctgagcaaggacacctacgacgacgacctggacaacctgctggcccagatcggcgaccagtacgccgacctgtttctggccgccaagaacctgtccgacgccatcctgctgagcgacatcctgagagtgaacaccgagatcaccaaggcccccctgagcgcctctatgatcaagagatacgacgagcaccaccaggacctgaccctgctgaaagctctcgtgcggcagcagctgcctgagaagtacaaagagattttcttcgaccagagcaagaacggctacgccggctacatcgatggcggagccagccaggaagagttctacaagttcatcaagcccatcctggaaaagatggacggcaccgaggaactgctcgtgaagctgaacagagaggacctgctgcggaagcagcggaccttcgacaacggcagcatcccccaccagatccacctgggagagctgcacgccattctgcggcggcaggaagatttttacccattcctgaaggacaaccgggaaaagatcgagaagatcctgaccttccgcatcccctactacgtgggccctctggccaggggaaacagcagattcgcctggatgaccagaaagagcgaggaaaccatcaccccctggaacttcgaggaagtggtggacaagggcgccagcgcccagagcttcatcgagcggatgaccaacttcgataagaacctgcccaacgagaaggtgctgcccaagcacagcctgctgtacgagtacttcaccgtgtacaacgagctgaccaaagtgaaatacgtgaccgagggaatgagaaagcccgccttcctgagcggcgagcagaaaaaagccatcgtggacctgctgttcaagaccaaccggaaagtgaccgtgaagcagctgaaagaggactacttcaagaaaatcgagtgcttcgactccgtggaaatctccggcgtggaagatcggttcaacgcctccctgggcacataccacgatctgctgaaaattatcaaggacaaggacttcctggacaatgaggaaaacgaggacattctggaagatatcgtgctgaccctgacactgtttgaggacagagagatgatcgaggaacggctgaaaacctatgcccacctgttcgacgacaaagtgatgaagcagctgaagcggcggagatacaccggctggggcaggctgagccggaagctgatcaacggcatccgggacaagcagtccggcaagacaatcctggatttcctgaagtccgacggcttcgccaacagaaacttcatgcagctgatccacgacgacagcctgacctttaaagaggacatccagaaagcccaggtgtccggccagggcgatagcctgcacgagcacattgccaatctggccggcagccccgccattaagaagggcatcctgcagacagtgaaggtggtggacgagctcgtgaaagtgatgggccggcacaagcccgagaacatcgtgatcgaaatggccagagagaaccagaccacccagaagggacagaagaacagccgcgagagaatgaagcggatcgaagagggcatcaaagagctgggcagccagatcctgaaagaacaccccgtggaaaacacccagctgcagaacgagaagctgtacctgtactacctgcagaatgggcgggatatgtacgtggaccaggaactggacatcaaccggctgtccgactacgatgtggacgctatcgtgcctcagagctttctgaaggacgactccatcgataacaaagtgctgactcggagcgacaagaaccggggcaagagcgacaacgtgccctccgaagaggtcgtgaagaagatgaagaactactggcgccagctgctgaatgccaagctgattacccagaggaagttcgacaatctgaccaaggccgagagaggcggcctgagcgaactggataaggccggcttcatcaagagacagctggtggaaacccggcagatcacaaagcacgtggcacagatcctggactcccggatgaacactaagtacgacgagaacgacaaactgatccgggaagtgaaagtgatcaccctgaagtccaagctggtgtccgatttccggaaggatttccagttttacaaagtgcgcgagatcaacaactaccaccacgcccacgacgcctacctgaacgccgtcgtgggaaccgccctgatcaaaaagtaccctaagctggaaagcgagttcgtgtacggcgactacaaggtgtacgacgtgcggaagatgatcgccaagagcgagcaggaaatcggcaaggctaccgccaagtacttcttctacagcaacatcatgaactttttcaagaccgagattaccctggccaacggcgagatccggaagcggcctctgatcgagacaaacggcgaaacaggcgagatcgtgtgggataagggccgggactttgccaccgtgcggaaagtgctgtctatgccccaagtgaatatcgtgaaaaagaccgaggtgcagacaggcggcttcagcaaagagtctatcctgcccaagaggaacagcgacaagctgatcgccagaaagaaggactgggaccctaagaagtacggcggcttcgacagccccaccgtggcctattctgtgctggtggtggccaaagtggaaaagggcaagtccaagaaactgaagagtgtgaaagagctgctggggatcaccatcatggaaagaagcagcttcgagaagaatcccatcgactttctggaagccaagggctacaaagaagtgaaaaaggacctgatcatcaagctgcctaagtactccctgttcgagctggaaaacggccggaagagaatgctggcctctgccggcgaactgcagaagggaaacgaactggccctgccctccaaatatgtgaacttcctgtacctggccagccactatgagaagctgaagggctcccccgaggataatgagcagaaacagctgtttgtggaacagcacaaacactacctggacgagatcatcgagcagatcagcgagttctccaagagagtgatcctggccgacgctaatctggacaaggtgctgagcgcctacaacaagcacagagacaagcctatcagagagcaggccgagaatatcatccacctgtttaccctgaccaatctgggagcccctgccgccttcaagtactttgacaccaccatcgaccggaagaggtacaccagcaccaaagaggtgctggacgccaccctgatccaccagagcatcaccggcctgtacgagacacggatcgacctgtctcagctgggaggcgacgcctatccctatgacgtgcccgattatgccagcctgggcagcggctcccccaagaaaaaacgcaaggtggaagatcctaagaaaaagcggaaagtggacggcggagggccgagctctggcgcacccccaccaagtggagggtctcctgccgggtccccaacatctactgaagaaggcaccagcgaatccgcaacgcccgagtcaggccctggtacctccacagaaccatctgaaggtagtgcgcctggttccccagctggaagccctacttccaccgaagaaggcacgtcaaccgaaccaagtgaaggatctgcccctgggaccagcactgaaccatctgagggcagcggcagcgagacccccggtaccagcgagagcgccacccccgagagcatgttcgaaaccgtgcctgtgtggaggagacagccagtccgggtgctgtccctttttgaagacatcaagaaagagctgacgagtttgggctttttggaaagtggttctgacccgggacaactgaagcatgtggttgatgtcacagacacagtgaggaaggatgtggaggagtggggacccttcgatcttgtgtacggcgccacacctcccctgggccacacctgtgaccgtcctcccagctggtacctgttccagttccaccggctcctgcagtacgcacggcccaagccaggcagccccaggcccttcttctggatgttcgtggacaatctggtgctgaacaaggaagacctggacgtcgcatctcgcttcctggagatggagccagtcaccatcccagatgtccacggcggatccttgcagaatgctgtccgcgtgtggagcaacatcccagccataaggagcagcaggcactgggctctggtttcggaagaagaattgtccctgctggcccagaacaagcagagctcgaagctcgcggccaagtggcccaccaagctggtgaagaactgctttctccccctaagagaatatttcaagtatttttcaacagaactcacttcctctttatctagcggcaatagtaacgctaacagccgcgggccgagcttcagcagcggcctggtgccgttaagcttgcgcggcagccatatgaaccatgaccaggaatttgaccccccaaaggtttacccacctgtgccagctgagaagaggaagcccatccgcgtgctgtctctctttgatgggattgctacagggctcctggtgctgaaggacctgggcatccaagtggaccgctacattgcctccgaggtgtgtgaggactccatcacggtgggcatggtgcggcaccagggaaagatcatgtacgtcggggacgtccgcagcgtcacacagaagcatatccaggagtggggcccattcgacctggtgattggaggcagtccctgcaatgacctctccattgtcaaccctgcccgcaagggactttatgagggtactggccgcctcttctttgagttctaccgcctcctgcatgatgcgcggcccaaggagggagatgatcgccccttcttctggctctttgagaatgtggtggccatgggcgttagtgacaagagggacatctcgcgatttcttgagtctaaccccgtgatgattgacgccaaagaagtgtctgctgcacacagggcccgttacttctggggtaaccttcctggcatgaacaggcctttggcatccactgtgaatgataagctggagctgcaagagtgtctggagcacggcagaatagccaagttcagcaaagtgaggaccattaccaccaggtcaaactctataaagcagggcaaagaccagcatttccccgtcttcatgaacgagaaggaggacatcctgtggtgcactgaaatggaaagggtgtttggcttccccgtccactacacagacgtctccaacatgagccgcttggcgaggcagagactgctgggccgatcgtggagcgtgccggtcatccgccacctcttcgctccgctgaaggaatattttgcttgtgtgagcggcagcgagacccccggtaccagcgagagcgctacacccgaatccggccccggcagccccgccggcagccctacaagcaccgaggagggcacctccgaatccgccacccctgagagcggacccggcagcgagcctgccacaagcggcagcgagacacctggaacaagcgagagcgccacacctgaaagcggccccggaacatccaccgagcctagcgagggcagcgcccctggcacaagcacagagccttccgagagcgccacccccgagagccggacactggtgaccttcaaggatgtatttgtggacttcaccagggaggagtggaagctgctggacactgctcagcagatcgtgtacagaaatgtgatgctggagaactataagaacctggtttccttgggttatcagcttactaagccagatgtgatcctccggttggagaagggagaagagcccctcgagtgataatagggatcccaagcacgcagcaatgcagctcaaaacgcttagcctagccacacccccacgggaaacagcagtgattaacctttagcaataaacgaaagtttaactaagctatactaaccccagggttggtcaatttcgtgccagccacaccctggtactgcatgcacgcaatgctagctgcccctttcccgtcctgggcaccccgagtctcccccgaccccgggtcccaggtatgctcccacctccacctgccccactcaccacctctgctagttccagacacctccgaagatgg

SEQ ID NO: 285 - RNA, 7068 nt, synthetic construct
  misc_feature 1..7068: note = V33 mRNA
  source 1..7068: mol_type = other RNA
aggactcactatttgttttcgcgcccagttgcaaaaagtgtcgacatttgcttctgacacaactgtgttcactagcaacctcaaacagacaccttaattaagccaccatgccaaaaaagaagagaaaggtaatggacaagaagtacagcatcggcctggccatcggcaccaactctgtgggctgggccgtgatcaccgacgagtacaaggtgcccagcaagaaattcaaggtgctgggcaacaccgaccggcacagcatcaagaagaacctgatcggcgccctgctgttcgacagcggagaaacagccgaggccacccggctgaagagaaccgccagaagaagatacaccagacggaagaaccggatctgctatctgcaagagatcttcagcaacgagatggccaaggtggacgacagcttcttccacagactggaagagtccttcctggtggaagaggataagaagcacgagcggcaccccatcttcggcaacatcgtggacgaggtggcctaccacgagaagtaccccaccatctaccacctgagaaagaaactggtggacagcaccgacaaggccgacctgcggctgatctatctggccctggcccacatgatcaagttccggggccacttcctgatcgagggcgacctgaaccccgacaacagcgacgtggacaagctgttcatccagctggtgcagacctacaaccagctgttcgaggaaaaccccatcaacgccagcggcgtggacgccaaggccatcctgtctgccagactgagcaagagcagacggctggaaaatctgatcgcccagctgcccggcgagaagaagaatggcctgttcggcaacctgattgccctgagcctgggcctgacccccaacttcaagagcaacttcgacctggccgaggatgccaaactgcagctgagcaaggacacctacgacgacgacctggacaacctgctggcccagatcggcgaccagtacgccgacctgtttctggccgccaagaacctgtccgacgccatcctgctgagcgacatcctgagagtgaacaccgagatcaccaaggcccccctgagcgcctctatgatcaagagatacgacgagcaccaccaggacctgaccctgctgaaagctctcgtgcggcagcagctgcctgagaagtacaaagagattttcttcgaccagagcaagaacggctacgccggctacatcgatggcggagccagccaggaagagttctacaagttcatcaagcccatcctggaaaagatggacggcaccgaggaactgctcgtgaagctgaacagagaggacctgctgcggaagcagcggaccttcgacaacggcagcatcccccaccagatccacctgggagagctgcacgccattctgcggcggcaggaagatttttacccattcctgaaggacaaccgggaaaagatcgagaagatcctgaccttccgcatcccctactacgtgggccctctggccaggggaaacagcagattcgcctggatgaccagaaagagcgaggaaaccatcaccccctggaacttcgaggaagtggtggacaagggcgccagcgcccagagcttcatcgagcggatgaccaacttcgataagaacctgcccaacgagaaggtgctgcccaagcacagcctgctgtacgagtacttcaccgtgtacaacgagctgaccaaagtgaaatacgtgaccgagggaatgagaaagcccgccttcctgagcggcgagcagaaaaaagccatcgtggacctgctgttcaagaccaaccggaaagtgaccgtgaagcagctgaaagaggactacttcaagaaaatcgagtgcttcgactccgtggaaatctccggcgtggaagatcggttcaacgcctccctgggcacataccacgatctgctgaaaattatcaaggacaaggacttcctggacaatgaggaaaacgaggacattctggaagatatcgtgctgaccctgacactgtttgaggacagagagatgatcgaggaacggctgaaaacctatgcccacctgttcgacgacaaagtgatgaagcagctgaagcggcggagatacaccggctggggcaggctgagccggaagctgatcaacggcatccgggacaagcagtccggcaagacaatcctggatttcctgaagtccgacggcttcgccaacagaaacttcatgcagctgatccacgacgacagcctgacctttaaagaggacatccagaaagcccaggtgtccggccagggcgatagcctgcacgagcacattgccaatctggccggcagccccgccattaagaagggcatcctgcagacagtgaaggtggtggacgagctcgtgaaagtgatgggccggcacaagcccgagaacatcgtgatcgaaatggccagagagaaccagaccacccagaagggacagaagaacagccgcgagagaatgaagcggatcgaagagggcatcaaagagctgggcagccagatcctgaaagaacaccccgtggaaaacacccagctgcagaacgagaagctgtacctgtactacctgcagaatgggcgggatatgtacgtggaccaggaactggacatcaaccggctgtccgactacgatgtggacgctatcgtgcctcagagctttctgaaggacgactccatcgataacaaagtgctgactcggagcgacaagaaccggggcaagagcgacaacgtgccctccgaagaggtcgtgaagaagatgaagaactactggcgccagctgctgaatgccaagctgattacccagaggaagttcgacaatctgaccaaggccgagagaggcggcctgagcgaactggataaggccggcttcatcaagagacagctggtggaaacccggcagatcacaaagcacgtggcacagatcctggactcccggatgaacactaagtacgacgagaacgacaaactgatccgggaagtgaaagtgatcaccctgaagtccaagctggtgtccgatttccggaaggatttccagttttacaaagtgcgcgagatcaacaactaccaccacgcccacgacgcctacctgaacgccgtcgtgggaaccgccctgatcaaaaagtaccctaagctggaaagcgagttcgtgtacggcgactacaaggtgtacgacgtgcggaagatgatcgccaagagcgagcaggaaatcggcaaggctaccgccaagtacttcttctacagcaacatcatgaactttttcaagaccgagattaccctggccaacggcgagatccggaagcggcctctgatcgagacaaacggcgaaacaggcgagatcgtgtgggataagggccgggactttgccaccgtgcggaaagtgctgtctatgccccaagtgaatatcgtgaaaaagaccgaggtgcagacaggcggcttcagcaaagagtctatcctgcccaagaggaacagcgacaagctgatcgccagaaagaaggactgggaccctaagaagtacggcggcttcgacagccccaccgtggcctattctgtgctggtggtggccaaagtggaaaagggcaagtccaagaaactgaagagtgtgaaagagctgctggggatcaccatcatggaaagaagcagcttcgagaagaatcccatcgactttctggaagccaagggctacaaagaagtgaaaaaggacctgatcatcaagctgcctaagtactccctgttcgagctggaaaacggccggaagagaatgctggcctctgccggcgaactgcagaagggaaacgaactggccctgccctccaaatatgtgaacttcctgtacctggccagccactatgagaagctgaagggctcccccgaggataatgagcagaaacagctgtttgtggaacagcacaaacactacctggacgagatcatcgagcagatcagcgagttctccaagagagtgatcctggccgacgctaatctggacaaggtgctgagcgcctacaacaagcacagagacaagcctatcagagagcaggccgagaatatcatccacctgtttaccctgaccaatctgggagcccctgccgccttcaagtactttgacaccaccatcgaccggaagaggtacaccagcaccaaagaggtgctggacgccaccctgatccaccagagcatcaccggcctgtacgagacacggatcgacctgtctcagctgggaggcgacgcctatccctatgacgtgcccgattatgccagcctgggcagcggctcccccaagaaaaaacgcaaggtggaagatcctaagaaaaagcggaaagtggacggcggagggccgagctctggcgcacccccaccaagtggagggtctcctgccgggtccccaacatctactgaagaaggcaccagcgaatccgcaacgcccgagtcaggccctggtacctccacagaaccatctgaaggtagtgcgcctggttccccagctggaagccctacttccaccgaagaaggcacgtcaaccgaaccaagtgaaggatctgcccctgggaccagcactgaaccatctgagatgaacaattcccagggaagagtgaccttcgaggacgtgaccgtgaacttcacccaaggcgagtggcagagactgaaccccgagcagagaaacctgtaccgggacgtgatgctggaaaactacagcaacctggtgtccgtcggccagggcgagacaacaaagcctgacgtgatcctgcggctggaacagggcaaagagccttggctggaagaggaagaggtgctcggatctggcagagccgagaagaatggcgatatcggcggacagatctggaagccaaaggatgtgaaagagagtctcagcggcagcgagacccccggtaccagcgagggcggccctagcagcggcgcccctccccctagcggcggcagccctgccggatcccctacaagcaccgaagaaggcacaagcgagtccgctacccctgagtccggccctggcacctccacagagcctagcgagggatccgctcctggatcccctgccggaagccctacctccaccgaggagggcacaagcaccgagccttccgagggcagcgcccccggaacaagcaccgaacctagcgagagcgccacccccgagagcggatccaaccatgaccaggaatttgaccccccaaaggtttacccacctgtgccagctgagaagaggaagcccatccgcgtgctgtctctctttgatgggattgctacagggctcctggtgctgaaggacctgggcatccaagtggaccgctacattgcctccgaggtgtgtgaggactccatcacggtgggcatggtgcggcaccagggaaagatcatgtacgtcggggacgtccgcagcgtcacacagaagcatatccaggagtggggcccattcgacctggtgattggaggcagtccctgcaatgacctctccattgtcaaccctgcccgcaagggactttatgagggtactggccgcctcttctttgagttctaccgcctcctgcatgatgcgcggcccaaggagggagatgatcgccccttcttctggctctttgagaatgtggtggccatgggcgttagtgacaagagggacatctcgcgatttcttgagtctaaccccgtgatgattgacgccaaagaagtgtctgctgcacacagggcccgttacttctggggtaaccttcctggcatgaacaggcctttggcatccactgtgaatgataagctggagctgcaagagtgtctggagcacggcagaatagccaagttcagcaaagtgaggaccattaccaccaggtcaaactctataaagcagggcaaagaccagcatttccccgtgttcatgaacgagaaggaggacatcctgtggtgcactgaaatggaaagggtgtttggcttccccgtccactacacagacgtctccaacatgagccgcttggcgaggcagagactgctgggccgatcgtggagcgtgccggtcatccgccacctcttcgctccgctgaaggaatattttgcttgtgtgtctagcggcaatagtaacgctaacagccgcgggccgagcttcagcagcggcctggtgccgttaagcttgcgcggcagccatatgttcgaaaccgtgcctgtgtggaggagacagccagtccgggtgctgtccctttttgaagacatcaagaaagagctgacgagtttgggctttttggaaagtggttctgacccgggacaactgaagcatgtggttgatgtcacagacacagtgaggaaggatgtggaggagtggggacccttcgatcttgtgtacggcgccacacctcccctgggccacacctgtgaccgtcctcccagctggtacctgttccagttccaccggctcctgcagtacgcacggcccaagccaggcagccccaggcccttcttctggatgttcgtggacaatctggtgctgaacaaggaagacctggacgtcgcatctcgcttcctggagatggagccagtcaccatcccagatgtccacggcggatccttgcagaatgctgtccgcgtgtggagcaacatcccagccataaggagcagcaggcactgggctctggtttcggaagaagaattgtccctgctggcccagaacaagcagagctcgaagctcgcggccaagtggcccaccaagctggtgaagaactgctttctccccctaagagaatatttcaagtatttttcaatgcattaatgagatcccaagcacgcagcaatgcagctcaaaacgcttagcctagccacacccccacgggaaacagcagtgattaacctttagcaataaacgaaagtttaactaagctatactaaccccagggttggtcaatttcgtgccagccacaccctggtactgcatgcacgcaatgctagctgcccctttcccgtcctgggcaccccgagtctcccccgaccccgggtcccaggtatgctcccacctccacctgccccactcaccacctctgctagttccagacacctccgagacgagg

SEQ ID NO: 286 - RNA, 7680 nt, synthetic construct
  misc_feature 1..7680: note = V34 mRNA
  source 1..7680: mol_type = other RNA
aggactcactatttgttttcgcgcccagttgcaaaaagtgtcgacatttgcttctgacacaactgtgttcactagcaacctcaaacagacaccttaattaagccaccatgccaaaaaagaagagaaaggtaatggacaagaagtacagcatcggcctggccatcggcaccaactctgtgggctgggccgtgatcaccgacgagtacaaggtgcccagcaagaaattcaaggtgctgggcaacaccgaccggcacagcatcaagaagaacctgatcggcgccctgctgttcgacagcggagaaacagccgaggccacccggctgaagagaaccgccagaagaagatacaccagacggaagaaccggatctgctatctgcaagagatcttcagcaacgagatggccaaggtggacgacagcttcttccacagactggaagagtccttcctggtggaagaggataagaagcacgagcggcaccccatcttcggcaacatcgtggacgaggtggcctaccacgagaagtaccccaccatctaccacctgagaaagaaactggtggacagcaccgacaaggccgacctgcggctgatctatctggccctggcccacatgatcaagttccggggccacttcctgatcgagggcgacctgaaccccgacaacagcgacgtggacaagctgttcatccagctggtgcagacctacaaccagctgttcgaggaaaaccccatcaacgccagcggcgtggacgccaaggccatcctgtctgccagactgagcaagagcagacggctggaaaatctgatcgcccagctgcccggcgagaagaagaatggcctgttcggcaacctgattgccctgagcctgggcctgacccccaacttcaagagcaacttcgacctggccgaggatgccaaactgcagctgagcaaggacacctacgacgacgacctggacaacctgctggcccagatcggcgaccagtacgccgacctgtttctggccgccaagaacctgtccgacgccatcctgctgagcgacatcctgagagtgaacaccgagatcaccaaggcccccctgagcgcctctatgatcaagagatacgacgagcaccaccaggacctgaccctgctgaaagctctcgtgcggcagcagctgcctgagaagtacaaagagattttcttcgaccagagcaagaacggctacgccggctacatcgatggcggagccagccaggaagagttctacaagttcatcaagcccatcctggaaaagatggacggcaccgaggaactgctcgtgaagctgaacagagaggacctgctgcggaagcagcggaccttcgacaacggcagcatcccccaccagatccacctgggagagctgcacgccattctgcggcggcaggaagatttttacccattcctgaaggacaaccgggaaaagatcgagaagatcctgaccttccgcatcccctactacgtgggccctctggccaggggaaacagcagattcgcctggatgaccagaaagagcgaggaaaccatcaccccctggaacttcgaggaagtggtggacaagggcgccagcgcccagagcttcatcgagcggatgaccaacttcgataagaacctgcccaacgagaaggtgctgcccaagcacagcctgctgtacgagtacttcaccgtgtacaacgagctgaccaaagtgaaatacgtgaccgagggaatgagaaagcccgccttcctgagcggcgagcagaaaaaagccatcgtggacctgctgttcaagaccaaccggaaagtgaccgtgaagcagctgaaagaggactacttcaagaaaatcgagtgcttcgactccgtggaaatctccggcgtggaagatcggttcaacgcctccctgggcacataccacgatctgctgaaaattatcaaggacaaggacttcctggacaatgaggaaaacgaggacattctggaagatatcgtgctgaccctgacactgtttgaggacagagagatgatcgaggaacggctgaaaacctatgcccacctgttcgacgacaaagtgatgaagcagctgaagcggcggagatacaccggctggggcaggctgagccggaagctgatcaacggcatccgggacaagcagtccggcaagacaatcctggatttcctgaagtccgacggcttcgccaacagaaacttcatgcagctgatccacgacgacagcctgacctttaaagaggacatccagaaagcccaggtgtccggccagggcgatagcctgcacgagcacattgccaatctggccggcagccccgccattaagaagggcatcctgcagacagtgaaggtggtggacgagctcgtgaaagtgatgggccggcacaagcccgagaacatcgtgatcgaaatggccagagagaaccagaccacccagaagggacagaagaacagccgcgagagaatgaagcggatcgaagagggcatcaaagagctgggcagccagatcctgaaagaacaccccgtggaaaacacccagctgcagaacgagaagctgtacctgtactacctgcagaatgggcgggatatgtacgtggaccaggaactggacatcaaccggctgtccgactacgatgtggacgctatcgtgcctcagagctttctgaaggacgactccatcgataacaaagtgctgactcggagcgacaagaaccggggcaagagcgacaacgtgccctccgaagaggtcgtgaagaagatgaagaactactggcgccagctgctgaatgccaagctgattacccagaggaagttcgacaatctgaccaaggccgagagaggcggcctgagcgaactggataaggccggcttcatcaagagacagctggtggaaacccggcagatcacaaagcacgtggcacagatcctggactcccggatgaacactaagtacgacgagaacgacaaactgatccgggaagtgaaagtgatcaccctgaagtccaagctggtgtccgatttccggaaggatttccagttttacaaagtgcgcgagatcaacaactaccaccacgcccacgacgcctacctgaacgccgtcgtgggaaccgccctgatcaaaaagtaccctaagctggaaagcgagttcgtgtacggcgactacaaggtgtacgacgtgcggaagatgatcgccaagagcgagcaggaaatcggcaaggctaccgccaagtacttcttctacagcaacatcatgaactttttcaagaccgagattaccctggccaacggcgagatccggaagcggcctctgatcgagacaaacggcgaaacaggcgagatcgtgtgggataagggccgggactttgccaccgtgcggaaagtgctgtctatgccccaagtgaatatcgtgaaaaagaccgaggtgcagacaggcggcttcagcaaagagtctatcctgcccaagaggaacagcgacaagctgatcgccagaaagaaggactgggaccctaagaagtacggcggcttcgacagccccaccgtggcctattctgtgctggtggtggccaaagtggaaaagggcaagtccaagaaactgaagagtgtgaaagagctgctggggatcaccatcatggaaagaagcagcttcgagaagaatcccatcgactttctggaagccaagggctacaaagaagtgaaaaaggacctgatcatcaagctgcctaagtactccctgttcgagctggaaaacggccggaagagaatgctggcctctgccggcgaactgcagaagggaaacgaactggccctgccctccaaatatgtgaacttcctgtacctggccagccactatgagaagctgaagggctcccccgaggataatgagcagaaacagctgtttgtggaacagcacaaacactacctggacgagatcatcgagcagatcagcgagttctccaagagagtgatcctggccgacgctaatctggacaaggtgctgagcgcctacaacaagcacagagacaagcctatcagagagcaggccgagaatatcatccacctgtttaccctgaccaatctgggagcccctgccgccttcaagtactttgacaccaccatcgaccggaagaggtacaccagcaccaaagaggtgctggacgccaccctgatccaccagagcatcaccggcctgtacgagacacggatcgacctgtctcagctgggaggcgacgcctatccctatgacgtgcccgattatgccagcctgggcagcggctcccccaagaaaaaacgcaaggtggaagatcctaagaaaaagcggaaagtggacggcggagggccgagctctggcgcacccccaccaagtggagggtctcctgccgggtccccaacatctactgaagaaggcaccagcgaatccgcaacgcccgagtcaggccctggtacccatgtgagcgagctgattaaggagaacatgcacatgaagctgtacatggagggcaccgtggacaaccatcacttcaagtgcacatccgagggcgaaggcaagccctacgagggcacccagaccatgagaatcaaggtggtcgagggcggccctctccccttcgccttcgacatcctggctactagcttcctctacggcagcaagaccttcatcaaccacacccagggcatccccgacttcttcaagcagtccttccctgagggcttcacatgggagagagtcaccacatacgaagacgggggcgtgctgaccgctacccaggacaccagcctccaggacggctgcctcatctacaacgtcaagatcagaggggtgaacttcacatccaacggccctgtgatgcagaagaaaacactcggctgggaggccttcaccgaaacgctgtaccccgctgacggcggcctggaaggcagaaacgacatggccctgaagctcgtgggcgggagccatctgatcgcaaacatcaagaccacatatagatccaagaaacccgctaagaacctcaagatgcctggcgtctactatgtggactacagactggaaagaatcaaggaggccaacaacgagacctacgtcgagcagcacgaggtggcagtggccagatactgcgacctccctagcaaactggggcacaagcttaatggatctgcccctgggaccagcactgaaccatctgagatgaacaattcccagggaagagtgaccttcgaggacgtgaccgtgaacttcacccaaggcgagtggcagagactgaaccccgagcagagaaacctgtaccgggacgtgatgctggaaaactacagcaacctggtgtccgtcggccagggcgagacaacaaagcctgacgtgatcctgcggctggaacagggcaaagagccttggctggaagaggaagaggtgctcggatctggcagagccgagaagaatggcgatatcggcggacagatctggaagccaaaggatgtgaaagagagtctcagcggcagcgagacccccggtaccagcgagggcggccctagcagcggcgcccctccccctagcggcggcagccctgccggatcccctacaagcaccgaagaaggcacaagcgagtccgctacccctgagtccggccctggcacctccacagagcctagcgagggatccgctcctggatcccctgccggaagccctacctccaccgaggagggcacaagcaccgagccttccgagggcagcgcccccggaacaagcaccgaacctagcgagagcgccacccccgagagcggatccaaccatgaccaggaatttgaccccccaaaggtttacccacctgtgccagctgagaagaggaagcccatccgcgtgctgtctctctttgatgggattgctacagggctcctggtgctgaaggacctgggcatccaagtggaccgctacattgcctccgaggtgtgtgaggactccatcacggtgggcatggtgcggcaccagggaaagatcatgtacgtcggggacgtccgcagcgtcacacagaagcatatccaggagtggggcccattcgacctggtgattggaggcagtccctgcaatgacctctccattgtcaaccctgcccgcaagggactttatgagggtactggccgcctcttctttgagttctaccgcctcctgcatgatgcgcggcccaaggagggagatgatcgccccttcttctggctctttgagaatgtggtggccatgggcgttagtgacaagagggacatctcgcgatttcttgagtctaaccccgtgatgattgacgccaaagaagtgtctgctgcacacagggcccgttacttctggggtaaccttcctggcatgaacaggcctttggcatccactgtgaatgataagctggagctgcaagagtgtctggagcacggcagaatagccaagttcagcaaagtgaggaccattaccaccaggtcaaactctataaagcagggcaaagaccagcatttccccgtgttcatgaacgagaaggaggacatcctgtggtgcactgaaatggaaagggtgtttggcttccccgtccactacacagacgtctccaacatgagccgcttggcgaggcagagactgctgggccgatcgtggagcgtgccggtcatccgccacctcttcgctccgctgaaggaatattttgcttgtgtgtctagcggcaatagtaacgctaacagccgcgggccgagcttcagcagcggcctggtgccgttaagcttgcgcggcagccatatgttcgaaaccgtgcctgtgtggaggagacagccagtccgggtgctgtccctttttgaagacatcaagaaagagctgacgagtttgggctttttggaaagtggttctgacccgggacaactgaagcatgtggttgatgtcacagacacagtgaggaaggatgtggaggagtggggacccttcgatcttgtgtacggcgccacacctcccctgggccacacctgtgaccgtcctcccagctggtacctgttccagttccaccggctcctgcagtacgcacggcccaagccaggcagccccaggcccttcttctggatgttcgtggacaatctggtgctgaacaaggaagacctggacgtcgcatctcgcttcctggagatggagccagtcaccatcccagatgtccacggcggatccttgcagaatgctgtccgcgtgtggagcaacatcccagccataaggagcagcaggcactgggctctggtttcggaagaagaattgtccctgctggcccagaacaagcagagctcgaagctcgcggccaagtggcccaccaagctggtgaagaactgctttctccccctaagagaatatttcaagtatttttcaatgcattaatgagatcccaagcacgcagcaatgcagctcaaaacgcttagcctagccacacccccacgggaaacagcagtgattaacctttagcaataaacgaaagtttaactaagctatactaaccccagggttggtcaatttcgtgccagccacaccctggtactgcatgcacgcaatgctagctgcccctttcccgtcctgggcaccccgagtctcccccgaccccgggtcccaggtatgctcccacctccacctgccccactcaccacctctgctagttccagacacctccgagacgagg

SEQ ID NO: 287 - RNA, 7698 nt, synthetic construct
  misc_feature 1..7698: note = V35 mRNA
  source 1..7698: mol_type = other RNA
aggactcactatttgttttcgcgcccagttgcaaaaagtgtcgacatttgcttctgacacaactgtgttcactagcaacctcaaacagacaccttaattaagccaccatgccaaaaaagaagagaaaggtaatggacaagaagtacagcatcggcctggccatcggcaccaactctgtgggctgggccgtgatcaccgacgagtacaaggtgcccagcaagaaattcaaggtgctgggcaacaccgaccggcacagcatcaagaagaacctgatcggcgccctgctgttcgacagcggagaaacagccgaggccacccggctgaagagaaccgccagaagaagatacaccagacggaagaaccggatctgctatctgcaagagatcttcagcaacgagatggccaaggtggacgacagcttcttccacagactggaagagtccttcctggtggaagaggataagaagcacgagcggcaccccatcttcggcaacatcgtggacgaggtggcctaccacgagaagtaccccaccatctaccacctgagaaagaaactggtggacagcaccgacaaggccgacctgcggctgatctatctggccctggcccacatgatcaagttccggggccacttcctgatcgagggcgacctgaaccccgacaacagcgacgtggacaagctgttcatccagctggtgcagacctacaaccagctgttcgaggaaaaccccatcaacgccagcggcgtggacgccaaggccatcctgtctgccagactgagcaagagcagacggctggaaaatctgatcgcccagctgcccggcgagaagaagaatggcctgttcggcaacctgattgccctgagcctgggcctgacccccaacttcaagagcaacttcgacctggccgaggatgccaaactgcagctgagcaaggacacctacgacgacgacctggacaacctgctggcccagatcggcgaccagtacgccgacctgtttctggccgccaagaacctgtccgacgccatcctgctgagcgacatcctgagagtgaacaccgagatcaccaaggcccccctgagcgcctctatgatcaagagatacgacgagcaccaccaggacctgaccctgctgaaagctctcgtgcggcagcagctgcctgagaagtacaaagagattttcttcgaccagagcaagaacggctacgccggctacatcgatggcggagccagccaggaagagttctacaagttcatcaagcccatcctggaaaagatggacggcaccgaggaactgctcgtgaagctgaacagagaggacctgctgcggaagcagcggaccttcgacaacggcagcatcccccaccagatccacctgggagagctgcacgccattctgcggcggcaggaagatttttacccattcctgaaggacaaccgggaaaagatcgagaagatcctgaccttccgcatcccctactacgtgggccctctggccaggggaaacagcagattcgcctggatgaccagaaagagcgaggaaaccatcaccccctggaacttcgaggaagtggtggacaagggcgccagcgcccagagcttcatcgagcggatgaccaacttcgataagaacctgcccaacgagaaggtgctgcccaagcacagcctgctgtacgagtacttcaccgtgtacaacgagctgaccaaagtgaaatacgtgaccgagggaatgagaaagcccgccttcctgagcggcgagcagaaaaaagccatcgtggacctgctgttcaagaccaaccggaaagtgaccgtgaagcagctgaaagaggactacttcaagaaaatcgagtgcttcgactccgtggaaatctccggcgtggaagatcggttcaacgcctccctgggcacataccacgatctgctgaaaattatcaaggacaaggacttcctggacaatgaggaaaacgaggacattctggaagatatcgtgctgaccctgacactgtttgaggacagagagatgatcgaggaacggctgaaaacctatgcccacctgttcgacgacaaagtgatgaagcagctgaagcggcggagatacaccggctggggcaggctgagccggaagctgatcaacggcatccgggacaagcagtccggcaagacaatcctggatttcctgaagtccgacggcttcgccaacagaaacttcatgcagctgatccacgacgacagcctgacctttaaagaggacatccagaaagcccaggtgtccggccagggcgatagcctgcacgagcacattgccaatctggccggcagccccgccattaagaagggcatcctgcagacagtgaaggtggtggacgagctcgtgaaagtgatgggccggcacaagcccgagaacatcgtgatcgaaatggccagagagaaccagaccacccagaagggacagaagaacagccgcgagagaatgaagcggatcgaagagggcatcaaagagctgggcagccagatcctgaaagaacaccccgtggaaaacacccagctgcagaacgagaagctgtacctgtactacctgcagaatgggcgggatatgtacgtggaccaggaactggacatcaaccggctgtccgactacgatgtggacgctatcgtgcctcagagctttctgaaggacgactccatcgataacaaagtgctgactcggagcgacaagaaccggggcaagagcgacaacgtgccctccgaagaggtcgtgaagaagatgaagaactactggcgccagctgctgaatgccaagctgattacccagaggaagttcgacaatctgaccaaggccgagagaggcggcctgagcgaactggataaggccggcttcatcaagagacagctggtggaaacccggcagatcacaaagcacgtggcacagatcctggactcccggatgaacactaagtacgacgagaacgacaaactgatccgggaagtgaaagtgatcaccctgaagtccaagctggtgtccgatttccggaaggatttccagttttacaaagtgcgcgagatcaacaactaccaccacgcccacgacgcctacctgaacgccgtcgtgggaaccgccctgatcaaaaagtaccctaagctggaaagcgagttcgtgtacggcgactacaaggtgtacgacgtgcggaagatgatcgccaagagcgagcaggaaatcggcaaggctaccgccaagtacttcttctacagcaacatcatgaactttttcaagaccgagattaccctggccaacggcgagatccggaagcggcctctgatcgagacaaacggcgaaacaggcgagatcgtgtgggataagggccgggactttgccaccgtgcggaaagtgctgtctatgccccaagtgaatatcgtgaaaaagaccgaggtgcagacaggcggcttcagcaaagagtctatcctgcccaagaggaacagcgacaagctgatcgccagaaagaaggactgggaccctaagaagtacggcggcttcgacagccccaccgtggcctattctgtgctggtggtggccaaagtggaaaagggcaagtccaagaaactgaagagtgtgaaagagctgctggggatcaccatcatggaaagaagcagcttcgagaagaatcccatcgactttctggaagccaagggctacaaagaagtgaaaaaggacctgatcatcaagctgcctaagtactccctgttcgagctggaaaacggccggaagagaatgctggcctctgccggcgaactgcagaagggaaacgaactggccctgccctccaaatatgtgaacttcctgtacctggccagccactatgagaagctgaagggctcccccgaggataatgagcagaaacagctgtttgtggaacagcacaaacactacctggacgagatcatcgagcagatcagcgagttctccaagagagtgatcctggccgacgctaatctggacaaggtgctgagcgcctacaacaagcacagagacaagcctatcagagagcaggccgagaatatcatccacctgtttaccctgaccaatctgggagcccctgccgccttcaagtactttgacaccaccatcgaccggaagaggtacaccagcaccaaagaggtgctggacgccaccctgatccaccagagcatcaccggcctgtacgagacacggatcgacctgtctcagctgggaggcgacgcctatccctatgacgtgcccgattatgccagcctgggcagcggctcccccaagaaaaaacgcaaggtggaagatcctaagaaaaagcggaaagtggacggcggagggccgagctctggcgcacccccaccaagtggagggtctcctgccgggtccccaacatctactgaagaaggcaccagcgaatccgcaacgcccgagtcaggccctggtacccatgtgagcgagctgattaaggagaacatgcacatgaagctgtacatggagggcaccgtggacaaccatcacttcaagtgcacatccgagggcgaaggcaagccctacgagggcacccagaccatgagaatcaaggtggtcgagggcggccctctccccttcgccttcgacatcctggctactagcttcctctacggcagcaagaccttcatcaaccacacccagggcatccccgacttcttcaagcagtccttccctgagggcttcacatgggagagagtcaccacatacgaagacgggggcgtgctgaccgctacccaggacaccagcctccaggacggctgcctcatctacaacgtcaagatcagaggggtgaacttcacatccaacggccctgtgatgcagaagaaaacactcggctgggaggccttcaccgaaacgctgtaccccgctgacggcggcctggaaggcagaaacgacatggccctgaagctcgtgggcgggagccatctgatcgcaaacatcaagaccacatatagatccaagaaacccgctaagaacctcaagatgcctggcgtctactatgtggactacagactggaaagaatcaaggaggccaacaacgagacctacgtcgagcagcacgaggtggcagtggccagatactgcgacctccctagcaaactggggcacaagcttaatggatctgcccctgggaccagcactgaaccatctgagatgaacaattcccagggaagagtgaccttcgaggacgtgaccgtgaacttcacccaaggcgagtggcagagactgaaccccgagcagagaaacctgtaccgggacgtgatgctggaaaactacagcaacctggtgtccgtcggccagggcgagacaacaaagcctgacgtgatcctgcggctggaacagggcaaagagccttggctggaagaggaagaggtgctcggatctggcagagccgagaagaatggcgatatcggcggacagatctggaagccaaaggatgtgaaagagagtctcagcggcagcgagacccccggtaccagcgagggcggccctagcagcggcgcccctccccctagcggcggcagccctgccggatcccctacaagcaccgaagaaggcacaagcgagtccgctacccctgagtccggccctggcacctccacagagcctagcgagggatccgctcctggatcccctgccggaagccctacctccaccgaggagggcacaagcaccgagccttccgagggcagcgcccccggaacaagcaccgaacctagcgagagcgccacccccgagagcatgttcgaaaccgtgcctgtgtggaggagacagccagtccgggtgctgtccctttttgaagacatcaagaaagagctgacgagtttgggctttttggaaagtggttctgacccgggacaactgaagcatgtggttgatgtcacagacacagtgaggaaggatgtggaggagtggggacccttcgatcttgtgtacggcgccacacctcccctgggccacacctgtgaccgtcctcccagctggtacctgttccagttccaccggctcctgcagtacgcacggcccaagccaggcagccccaggcccttcttctggatgttcgtggacaatctggtgctgaacaaggaagacctggacgtcgcatctcgcttcctggagatggagccagtcaccatcccagatgtccacggcggatccttgcagaatgctgtccgcgtgtggagcaacatcccagccataaggagcagcaggcactgggctctggtttcggaagaagaattgtccctgctggcccagaacaagcagagctcgaagctcgcggccaagtggcccaccaagctggtgaagaactgctttctccccctaagagaatatttcaagtatttttcaacagaactcacttcctctttatctagcggcaatagtaacgctaacagccgcgggccgagcttcagcagcggcctggtgccgttaagcttgcgcggcagccatatgaaccatgaccaggaatttgaccccccaaaggtttacccacctgtgccagctgagaagaggaagcccatccgcgtgctgtctctctttgatgggattgctacagggctcctggtgctgaaggacctgggcatccaagtggaccgctacattgcctccgaggtgtgtgaggactccatcacggtgggcatggtgcggcaccagggaaagatcatgtacgtcggggacgtccgcagcgtcacacagaagcatatccaggagtggggcccattcgacctggtgattggaggcagtccctgcaatgacctctccattgtcaaccctgcccgcaagggactttatgagggtactggccgcctcttctttgagttctaccgcctcctgcatgatgcgcggcccaaggagggagatgatcgccccttcttctggctctttgagaatgtggtggccatgggcgttagtgacaagagggacatctcgcgatttcttgagtctaaccccgtgatgattgacgccaaagaagtgtctgctgcacacagggcccgttacttctggggtaaccttcctggcatgaacaggcctttggcatccactgtgaatgataagctggagctgcaagagtgtctggagcacggcagaatagccaagttcagcaaagtgaggaccattaccaccaggtcaaactctataaagcagggcaaagaccagcatttccccgtcttcatgaacgagaaggaggacatcctgtggtgcactgaaatggaaagggtgtttggcttccccgtccactacacagacgtctccaacatgagccgcttggcgaggcagagactgctgggccgatcgtggagcgtgccggtcatccgccacctcttcgctccgctgaaggaatattttgcttgtgtgctcgagtaatgagatcccaagcacgcagcaatgcagctcaaaacgcttagcctagccacacccccacgggaaacagcagtgattaacctttagcaataaacgaaagtttaactaagctatactaaccccagggttggtcaatttcgtgccagccacaccctggtactgcatgcacgcaatgctagctgcccctttcccgtcctgggcaccccgagtctcccccgaccccgggtcccaggtatgctcccacctccacctgccccactcaccacctctgctagttccagacacctccgagacgagg

SEQ ID NO: 288 - RNA, 7590 nt, synthetic construct
  misc_feature 1..7590: note = V36 mRNA
  source 1..7590: mol_type = other RNA
aggactcactatttgttttcgcgcccagttgcaaaaagtgtcgacatttgcttctgacacaactgtgttcactagcaacctcaaacagacaccttaattaagccaccatgccaaaaaagaagagaaaggtaatggacaagaagtacagcatcggcctggccatcggcaccaactctgtgggctgggccgtgatcaccgacgagtacaaggtgcccagcaagaaattcaaggtgctgggcaacaccgaccggcacagcatcaagaagaacctgatcggcgccctgctgttcgacagcggagaaacagccgaggccacccggctgaagagaaccgccagaagaagatacaccagacggaagaaccggatctgctatctgcaagagatcttcagcaacgagatggccaaggtggacgacagcttcttccacagactggaagagtccttcctggtggaagaggataagaagcacgagcggcaccccatcttcggcaacatcgtggacgaggtggcctaccacgagaagtaccccaccatctaccacctgagaaagaaactggtggacagcaccgacaaggccgacctgcggctgatctatctggccctggcccacatgatcaagttccggggccacttcctgatcgagggcgacctgaaccccgacaacagcgacgtggacaagctgttcatccagctggtgcagacctacaaccagctgttcgaggaaaaccccatcaacgccagcggcgtggacgccaaggccatcctgtctgccagactgagcaagagcagacggctggaaaatctgatcgcccagctgcccggcgagaagaagaatggcctgttcggcaacctgattgccctgagcctgggcctgacccccaacttcaagagcaacttcgacctggccgaggatgccaaactgcagctgagcaaggacacctacgacgacgacctggacaacctgctggcccagatcggcgaccagtacgccgacctgtttctggccgccaagaacctgtccgacgccatcctgctgagcgacatcctgagagtgaacaccgagatcaccaaggcccccctgagcgcctctatgatcaagagatacgacgagcaccaccaggacctgaccctgctgaaagctctcgtgcggcagcagctgcctgagaagtacaaagagattttcttcgaccagagcaagaacggctacgccggctacatcgatggcggagccagccaggaagagttctacaagttcatcaagcccatcctggaaaagatggacggcaccgaggaactgctcgtgaagctgaacagagaggacctgctgcggaagcagcggaccttcgacaacggcagcatcccccaccagatccacctgggagagctgcacgccattctgcggcggcaggaagatttttacccattcctgaaggacaaccgggaaaagatcgagaagatcctgaccttccgcatcccctactacgtgggccctctggccaggggaaacagcagattcgcctggatgaccagaaagagcgaggaaaccatcaccccctggaacttcgaggaagtggtggacaagggcgccagcgcccagagcttcatcgagcggatgaccaacttcgataagaacctgcccaacgagaaggtgctgcccaagcacagcctgctgtacgagtacttcaccgtgtacaacgagctgaccaaagtgaaatacgtgaccgagggaatgagaaagcccgccttcctgagcggcgagcagaaaaaagccatcgtggacctgctgttcaagaccaaccggaaagtgaccgtgaagcagctgaaagaggactacttcaagaaaatcgagtgcttcgactccgtggaaatctccggcgtggaagatcggttcaacgcctccctgggcacataccacgatctgctgaaaattatcaaggacaaggacttcctggacaatgaggaaaacgaggacattctggaagatatcgtgctgaccctgacactgtttgaggacagagagatgatcgaggaacggctgaaaacctatgcccacctgttcgacgacaaagtgatgaagcagctgaagcggcggagatacaccggctggggcaggctgagccggaagctgatcaacggcatccgggacaagcagtccggcaagacaatcctggatttcctgaagtccgacggcttcgccaacagaaacttcatgcagctgatccacgacgacagcctgacctttaaagaggacatccagaaagcccaggtgtccggccagggcgatagcctgcacgagcacattgccaatctggccggcagccccgccattaagaagggcatcctgcagacagtgaaggtggtggacgagctcgtgaaagtgatgggccggcacaagcccgagaacatcgtgatcgaaatggccagagagaaccagaccacccagaagggacagaagaacagccgcgagagaatgaagcggatcgaagagggcatcaaagagctgggcagccagatcctgaaagaacaccccgtggaaaacacccagctgcagaacgagaagctgtacctgtactacctgcagaatgggcgggatatgtacgtggaccaggaactggacatcaaccggctgtccgactacgatgtggacgctatcgtgcctcagagctttctgaaggacgactccatcgataacaaagtgctgactcggagcgacaagaaccggggcaagagcgacaacgtgccctccgaagaggtcgtgaagaagatgaagaactactggcgccagctgctgaatgccaagctgattacccagaggaagttcgacaatctgaccaaggccgagagaggcggcctgagcgaactggataaggccggcttcatcaagagacagctggtggaaacccggcagatcacaaagcacgtggcacagatcctggactcccggatgaacactaagtacgacgagaacgacaaactgatccgggaagtgaaagtgatcaccctgaagtccaagctggtgtccgatttccggaaggatttccagttttacaaagtgcgcgagatcaacaactaccaccacgcccacgacgcctacctgaacgccgtcgtgggaaccgccctgatcaaaaagtaccctaagctggaaagcgagttcgtgtacggcgactacaaggtgtacgacgtgcggaagatgatcgccaagagcgagcaggaaatcggcaaggctaccgccaagtacttcttctacagcaacatcatgaactttttcaagaccgagattaccctggccaacggcgagatccggaagcggcctctgatcgagacaaacggcgaaacaggcgagatcgtgtgggataagggccgggactttgccaccgtgcggaaagtgctgtctatgccccaagtgaatatcgtgaaaaagaccgaggtgcagacaggcggcttcagcaaagagtctatcctgcccaagaggaacagcgacaagctgatcgccagaaagaaggactgggaccctaagaagtacggcggcttcgacagccccaccgtggcctattctgtgctggtggtggccaaagtggaaaagggcaagtccaagaaactgaagagtgtgaaagagctgctggggatcaccatcatggaaagaagcagcttcgagaagaatcccatcgactttctggaagccaagggctacaaagaagtgaaaaaggacctgatcatcaagctgcctaagtactccctgttcgagctggaaaacggccggaagagaatgctggcctctgccggcgaactgcagaagggaaacgaactggccctgccctccaaatatgtgaacttcctgtacctggccagccactatgagaagctgaagggctcccccgaggataatgagcagaaacagctgtttgtggaacagcacaaacactacctggacgagatcatcgagcagatcagcgagttctccaagagagtgatcctggccgacgctaatctggacaaggtgctgagcgcctacaacaagcacagagacaagcctatcagagagcaggccgagaatatcatccacctgtttaccctgaccaatctgggagcccctgccgccttcaagtactttgacaccaccatcgaccggaagaggtacaccagcaccaaagaggtgctggacgccaccctgatccaccagagcatcaccggcctgtacgagacacggatcgacctgtctcagctgggaggcgacgcctatccctatgacgtgcccgattatgccagcctgggcagcggctcccccaagaaaaaacgcaaggtggaagatcctaagaaaaagcggaaagtggacggcggagggccgagctctggcgcacccccaccaagtggagggtctcctgccgggtccccaacatctactgaagaaggcaccagcgaatccgcaacgcccgagtcaggccctggtacccatgtgagcgagctgattaaggagaacatgcacatgaagctgtacatggagggcaccgtggacaaccatcacttcaagtgcacatccgagggcgaaggcaagccctacgagggcacccagaccatgagaatcaaggtggtcgagggcggccctctccccttcgccttcgacatcctggctactagcttcctctacggcagcaagaccttcatcaaccacacccagggcatccccgacttcttcaagcagtccttccctgagggcttcacatgggagagagtcaccacatacgaagacgggggcgtgctgaccgctacccaggacaccagcctccaggacggctgcctcatctacaacgtcaagatcagaggggtgaacttcacatccaacggccctgtgatgcagaagaaaacactcggctgggaggccttcaccgaaacgctgtaccccgctgacggcggcctggaaggcagaaacgacatggccctgaagctcgtgggcgggagccatctgatcgcaaacatcaagaccacatatagatccaagaaacccgctaagaacctcaagatgcctggcgtctactatgtggactacagactggaaagaatcaaggaggccaacaacgagacctacgtcgagcagcacgaggtggcagtggccagatactgcgacctccctagcaaactggggcacaagcttaatggatctgcccctgggaccagcactgaaccatctgagcggacactcgagctgttccgcgacgtggccattgtgttctctcaagaggaatggcagtggctggcccctgctcagagagatctctaccgcgacgttatgctggagacatactccaatctcgtgtccctcggcctggccgtgtccaaacctgatgtgatcagcttcctcgagcagggaaaagaaccttggatgagcggcagcgagacccccggtaccagcgagggcggccctagcagcggcgcccctccccctagcggcggcagccctgccggatcccctacaagcaccgaagaaggcacaagcgagtccgctacccctgagtccggccctggcacctccacagagcctagcgagggatccgctcctggatcccctgccggaagccctacctccaccgaggagggcacaagcaccgagccttccgagggcagcgcccccggaacaagcaccgaacctagcgagagcgccacccccgagagcatgttcgaaaccgtgcctgtgtggaggagacagccagtccgggtgctgtccctttttgaagacatcaagaaagagctgacgagtttgggctttttggaaagtggttctgacccgggacaactgaagcatgtggttgatgtcacagacacagtgaggaaggatgtggaggagtggggacccttcgatcttgtgtacggcgccacacctcccctgggccacacctgtgaccgtcctcccagctggtacctgttccagttccaccggctcctgcagtacgcacggcccaagccaggcagccccaggcccttcttctggatgttcgtggacaatctggtgctgaacaaggaagacctggacgtcgcatctcgcttcctggagatggagccagtcaccatcccagatgtccacggcggatccttgcagaatgctgtccgcgtgtggagcaacatcccagccataaggagcagcaggcactgggctctggtttcggaagaagaattgtccctgctggcccagaacaagcagagctcgaagctcgcggccaagtggcccaccaagctggtgaagaactgctttctccccctaagagaatatttcaagtatttttcaacagaactcacttcctctttatctagcggcaatagtaacgctaacagccgcgggccgagcttcagcagcggcctggtgccgttaagcttgcgcggcagccatatgaaccatgaccaggaatttgaccccccaaaggtttacccacctgtgccagctgagaagaggaagcccatccgcgtgctgtctctctttgatgggattgctacagggctcctggtgctgaaggacctgggcatccaagtggaccgctacattgcctccgaggtgtgtgaggactccatcacggtgggcatggtgcggcaccagggaaagatcatgtacgtcggggacgtccgcagcgtcacacagaagcatatccaggagtggggcccattcgacctggtgattggaggcagtccctgcaatgacctctccattgtcaaccctgcccgcaagggactttatgagggtactggccgcctcttctttgagttctaccgcctcctgcatgatgcgcggcccaaggagggagatgatcgccccttcttctggctctttgagaatgtggtggccatgggcgttagtgacaagagggacatctcgcgatttcttgagtctaaccccgtgatgattgacgccaaagaagtgtctgctgcacacagggcccgttacttctggggtaaccttcctggcatgaacaggcctttggcatccactgtgaatgataagctggagctgcaagagtgtctggagcacggcagaatagccaagttcagcaaagtgaggaccattaccaccaggtcaaactctataaagcagggcaaagaccagcatttccccgtcttcatgaacgagaaggaggacatcctgtggtgcactgaaatggaaagggtgtttggcttccccgtccactacacagacgtctccaacatgagccgcttggcgaggcagagactgctgggccgatcgtggagcgtgccggtcatccgccacctcttcgctccgctgaaggaatattttgcttgtgtgctcgagtaatgagatcccaagcacgcagcaatgcagctcaaaacgcttagcctagccacacccccacgggaaacagcagtgattaacctttagcaataaacgaaagtttaactaagctatactaaccccagggttggtcaatttcgtgccagccacaccctggtactgcatgcacgcaatgctagctgcccctttcccgtcctgggcaccccgagtctcccccgaccccgggtcccaggtatgctcccacctccacctgccccactcaccacctctgctagttccagacacctccgagacgagg

SEQ ID NO: 289 - RNA, 7590 nt, synthetic construct
  misc_feature 1..7590: note = V37 mRNA
  source 1..7590: mol_type = other RNA
aggactcactatttgttttcgcgcccagttgcaaaaagtgtcgacatttgcttctgacacaactgtgttcactagcaacctcaaacagacaccttaattaagccaccatgccaaaaaagaagagaaaggtaatggacaagaagtacagcatcggcctggccatcggcaccaactctgtgggctgggccgtgatcaccgacgagtacaaggtgcccagcaagaaattcaaggtgctgggcaacaccgaccggcacagcatcaagaagaacctgatcggcgccctgctgttcgacagcggagaaacagccgaggccacccggctgaagagaaccgccagaagaagatacaccagacggaagaaccggatctgctatctgcaagagatcttcagcaacgagatggccaaggtggacgacagcttcttccacagactggaagagtccttcctggtggaagaggataagaagcacgagcggcaccccatcttcggcaacatcgtggacgaggtggcctaccacgagaagtaccccaccatctaccacctgagaaagaaactggtggacagcaccgacaaggccgacctgcggctgatctatctggccctggcccacatgatcaagttccggggccacttcctgatcgagggcgacctgaaccccgacaacagcgacgtggacaagctgttcatccagctggtgcagacctacaaccagctgttcgaggaaaaccccatcaacgccagcggcgtggacgccaaggccatcctgtctgccagactgagcaagagcagacggctggaaaatctgatcgcccagctgcccggcgagaagaagaatggcctgttcggcaacctgattgccctgagcctgggcctgacccccaacttcaagagcaacttcgacctggccgaggatgccaaactgcagctgagcaaggacacctacgacgacgacctggacaacctgctggcccagatcggcgaccagtacgccgacctgtttctggccgccaagaacctgtccgacgccatcctgctgagcgacatcctgagagtgaacaccgagatcaccaaggcccccctgagcgcctctatgatcaagagatacgacgagcaccaccaggacctgaccctgctgaaagctctcgtgcggcagcagctgcctgagaagtacaaagagattttcttcgaccagagcaagaacggctacgccggctacatcgatggcggagccagccaggaagagttctacaagttcatcaagcccatcctggaaaagatggacggcaccgaggaactgctcgtgaagctgaacagagaggacctgctgcggaagcagcggaccttcgacaacggcagcatcccccaccagatccacctgggagagctgcacgccattctgcggcggcaggaagatttttacccattcctgaaggacaaccgggaaaagatcgagaagatcctgaccttccgcatcccctactacgtgggccctctggccaggggaaacagcagattcgcctggatgaccagaaagagcgaggaaaccatcaccccctggaacttcgaggaagtggtggacaagggcgccagcgcccagagcttcatcgagcggatgaccaacttcgataagaacctgcccaacgagaaggtgctgcccaagcacagcctgctgtacgagtacttcaccgtgtacaacgagctgaccaaagtgaaatacgtgaccgagggaatgagaaagcccgccttcctgagcggcgagcagaaaaaagccatcgtggacctgctgttcaagaccaaccggaaagtgaccgtgaagcagctgaaagaggactacttcaagaaaatcgagtgcttcgactccgtggaaatctccggcgtggaagatcggttcaacgcctccctgggcacataccacgatctgctgaaaattatcaaggacaaggacttcctggacaatgaggaaaacgaggacattctggaagatatcgtgctgaccctgacactgtttgaggacagagagatgatcgaggaacggctgaaaacctatgcccacctgttcgacgacaaagtgatgaagcagctgaagcggcggagatacaccggctggggcaggctgagccggaagctgatcaacggcatccgggacaagcagtccggcaagacaatcctggatttcctgaagtccgacggcttcgccaacagaaacttcatgcagctgatccacgacgacagcctgacctttaaagaggacatccagaaagcccaggtgtccggccagggcgatagcctgcacgagcacattgccaatctggccggcagccccgccattaagaagggcatcctgcagacagtgaaggtggtggacgagctcgtgaaagtgatgggccggcacaagcccgagaacatcgtgatcgaaatggccagagagaaccagaccacccagaagggacagaagaacagccgcgagagaatgaagcggatcgaagagggcatcaaagagctgggcagccagatcctgaaagaacaccccgtggaaaacacccagctgcagaacgagaagctgtacctgtactacctgcagaatgggcgggatatgtacgtggaccaggaactggacatcaaccggctgtccgactacgatgtggacgctatcgtgcctcagagctttctgaaggacgactccatcgataacaaagtgctgactcggagcgacaagaaccggggcaagagcgacaacgtgccctccgaagaggtcgtgaagaagatgaagaactactggcgccagctgctgaatgccaagctgattacccagaggaagttcgacaatctgaccaaggccgagagaggcggcctgagcgaactggataaggccggcttcatcaagagacagctggtggaaacccggcagatcacaaagcacgtggcacagatcctggactcccggatgaacactaagtacgacgagaacgacaaactgatccgggaagtgaaagtgatcaccctgaagtccaagctggtgtccgatttccggaaggatttccagttttacaaagtgcgcgagatcaacaactaccaccacgcccacgacgcctacctgaacgccgtcgtgggaaccgccctgatcaaaaagtaccctaagctggaaagcgagttcgtgtacggcgactacaaggtgtacgacgtgcggaagatgatcgccaagagcgagcaggaaatcggcaaggctaccgccaagtacttcttctacagcaacatcatgaactttttcaagaccgagattaccctggccaacggcgagatccggaagcggcctctgatcgagacaaacggcgaaacaggcgagatcgtgtgggataagggccgggactttgccaccgtgcggaaagtgctgtctatgccccaagtgaatatcgtgaaaaagaccgaggtgcagacaggcggcttcagcaaagagtctatcctgcccaagaggaacagcgacaagctgatcgccagaaagaaggactgggaccctaagaagtacggcggcttcgacagccccaccgtggcctattctgtgctggtggtggccaaagtggaaaagggcaagtccaagaaactgaagagtgtgaaagagctgctggggatcaccatcatggaaagaagcagcttcgagaagaatcccatcgactttctggaagccaagggctacaaagaagtgaaaaaggacctgatcatcaagctgcctaagtactccctgttcgagctggaaaacggccggaagagaatgctggcctctgccggcgaactgcagaagggaaacgaactggccctgccctccaaatatgtgaacttcctgtacctggccagccactatgagaagctgaagggctcccccgaggataatgagcagaaacagctgtttgtggaacagcacaaacactacctggacgagatcatcgagcagatcagcgagttctccaagagagtgatcctggccgacgctaatctggacaaggtgctgagcgcctacaacaagcacagagacaagcctatcagagagcaggccgagaatatcatccacctgtttaccctgaccaatctgggagcccctgccgccttcaagtactttgacaccaccatcgaccggaagaggtacaccagcaccaaagaggtgctggacgccaccctgatccaccagagcatcaccggcctgtacgagacacggatcgacctgtctcagctgggaggcgacgcctatccctatgacgtgcccgattatgccagcctgggcagcggctcccccaagaaaaaacgcaaggtggaagatcctaagaaaaagcggaaagtggacggcggagggccgagctctggcgcacccccaccaagtggagggtctcctgccgggtccccaacatctactgaagaaggcaccagcgaatccgcaacgcccgagtcaggccctggtacccatgtgagcgagctgattaaggagaacatgcacatgaagctgtacatggagggcaccgtggacaaccatcacttcaagtgcacatccgagggcgaaggcaagccctacgagggcacccagaccatgagaatcaaggtggtcgagggcggccctctccccttcgccttcgacatcctggctactagcttcctctacggcagcaagaccttcatcaaccacacccagggcatccccgacttcttcaagcagtccttccctgagggcttcacatgggagagagtcaccacatacgaagacgggggcgtgctgaccgctacccaggacaccagcctccaggacggctgcctcatctacaacgtcaagatcagaggggtgaacttcacatccaacggccctgtgatgcagaagaaaacactcggctgggaggccttcaccgaaacgctgtaccccgctgacggcggcctggaaggcagaaacgacatggccctgaagctcgtgggcgggagccatctgatcgcaaacatcaagaccacatatagatccaagaaacccgctaagaacctcaagatgcctggcgtctactatgtggactacagactggaaagaatcaaggaggccaacaacgagacctacgtcgagcagcacgaggtggcagtggccagatactgcgacctccctagcaaactggggcacaagcttaatggatctgcccctgggaccagcactgaaccatctgagcggacactcatggcctttgaggacgtcgccgtgtatttttcccaagaagaatggggactgctcgacactgcccagagagccctgtatcgcagagtcatgctggacaacttcgccctggtggcctccctgggcctgtctacaagcagacccagagtggtcattcagctggaaagaggcgaggaaccctgggtcagcggcagcgagacccccggtaccagcgagggcggccctagcagcggcgcccctccccctagcggcggcagccctgccggatcccctacaagcaccgaagaaggcacaagcgagtccgctacccctgagtccggccctggcacctccacagagcctagcgagggatccgctcctggatcccctgccggaagccctacctccaccgaggagggcacaagcaccgagccttccgagggcagcgcccccggaacaagcaccgaacctagcgagagcgccacccccgagagcatgttcgaaaccgtgcctgtgtggaggagacagccagtccgggtgctgtccctttttgaagacatcaagaaagagctgacgagtttgggctttttggaaagtggttctgacccgggacaactgaagcatgtggttgatgtcacagacacagtgaggaaggatgtggaggagtggggacccttcgatcttgtgtacggcgccacacctcccctgggccacacctgtgaccgtcctcccagctggtacctgttccagttccaccggctcctgcagtacgcacggcccaagccaggcagccccaggcccttcttctggatgttcgtggacaatctggtgctgaacaaggaagacctggacgtcgcatctcgcttcctggagatggagccagtcaccatcccagatgtccacggcggatccttgcagaatgctgtccgcgtgtggagcaacatcccagccataaggagcagcaggcactgggctctggtttcggaagaagaattgtccctgctggcccagaacaagcagagctcgaagctcgcggccaagtggcccaccaagctggtgaagaactgctttctccccctaagagaatatttcaagtatttttcaacagaactcacttcctctttatctagcggcaatagtaacgctaacagccgcgggccgagcttcagcagcggcctggtgccgttaagcttgcgcggcagccatatgaaccatgaccaggaatttgaccccccaaaggtttacccacctgtgccagctgagaagaggaagcccatccgcgtgctgtctctctttgatgggattgctacagggctcctggtgctgaaggacctgggcatccaagtggaccgctacattgcctccgaggtgtgtgaggactccatcacggtgggcatggtgcggcaccagggaaagatcatgtacgtcggggacgtccgcagcgtcacacagaagcatatccaggagtggggcccattcgacctggtgattggaggcagtccctgcaatgacctctccattgtcaaccctgcccgcaagggactttatgagggtactggccgcctcttctttgagttctaccgcctcctgcatgatgcgcggcccaaggagggagatgatcgccccttcttctggctctttgagaatgtggtggccatgggcgttagtgacaagagggacatctcgcgatttcttgagtctaaccccgtgatgattgacgccaaagaagtgtctgctgcacacagggcccgttacttctggggtaaccttcctggcatgaacaggcctttggcatccactgtgaatgataagctggagctgcaagagtgtctggagcacggcagaatagccaagttcagcaaagtgaggaccattaccaccaggtcaaactctataaagcagggcaaagaccagcatttccccgtcttcatgaacgagaaggaggacatcctgtggtgcactgaaatggaaagggtgtttggcttccccgtccactacacagacgtctccaacatgagccgcttggcgaggcagagactgctgggccgatcgtggagcgtgccggtcatccgccacctcttcgctccgctgaaggaatattttgcttgtgtgctcgagtaatgagatcccaagcacgcagcaatgcagctcaaaacgcttagcctagccacacccccacgggaaacagcagtgattaacctttagcaataaacgaaagtttaactaagctatactaaccccagggttggtcaatttcgtgccagccacaccctggtactgcatgcacgcaatgctagctgcccctttcccgtcctgggcaccccgagtctcccccgaccccgggtcccaggtatgctcccacctccacctgccccactcaccacctctgctagttccagacacctccgagacgagg

SEQ ID NO: 290 - RNA, 7572 nt, synthetic construct
  misc_feature 1..7572: note = V38 mRNA
  source 1..7572: mol_type = other RNA
aggactcactatttgttttcgcgcccagttgcaaaaagtgtcgacatttgcttctgacacaactgtgttcactagcaacctcaaacagacaccttaattaagccaccatgaacaattcccagggaagagtgaccttcgaggatgtcactgtgaacttcacccagggggagtggcagcggctgaatcccgaacagagaaacttgtacagggatgtgatgctggagaattacagcaaccttgtctctgtgggacaaggggaaaccaccaaacccgatgtgatcttgaggttggaacaaggaaaggagccatggttggaggaagaggaagtgctgggaagtggccgtgcagaaaaaaatggggacattggagggcagatttggaagccaaaggatgtgaaagagagtctcagcggcagcgagacccccggtaccagcgagagcgccacccccgagagccatgtgagcgagctgattaaggagaacatgcacatgaagctgtacatggagggcaccgtggacaaccatcacttcaagtgcacatccgagggcgaaggcaagccctacgagggcacccagaccatgagaatcaaggtggtcgagggcggccctctccccttcgccttcgacatcctggctactagcttcctctacggcagcaagaccttcatcaaccacacccagggcatccccgacttcttcaagcagtccttccctgagggcttcacatgggagagagtcaccacatacgaagacgggggcgtgctgaccgctacccaggacaccagcctccaggacggctgcctcatctacaacgtcaagatcagaggggtgaacttcacatccaacggccctgtgatgcagaagaaaacactcggctgggaggccttcaccgaaacgctgtaccccgctgacggcggcctggaaggcagaaacgacatggccctgaagctcgtgggcgggagccatctgatcgcaaacatcaagaccacatatagatccaagaaacccgctaagaacctcaagatgcctggcgtctactatgtggactacagactggaaagaatcaaggaggccaacaacgagacctacgtcgagcagcacgaggtggcagtggccagatactgcgacctccctagcaaactggggcacaagcttaatagcggcagcgagacccccggtaccagcgagagcgccacccccgagagcatgaaccatgaccaggaatttgaccccccaaaggtttacccacctgtgccagctgagaagaggaagcccatccgcgtgctgtctctctttgatgggattgctacagggctcctggtgctgaaggacctgggcatccaagtggaccgctacattgcctccgaggtgtgtgaggactccatcacggtgggcatggtgcggcaccagggaaagatcatgtacgtcggggacgtccgcagcgtcacacagaagcatatccaggagtggggcccattcgacctggtgattggaggcagtccctgcaatgacctctccattgtcaaccctgcccgcaagggactttatgagggtactggccgcctcttctttgagttctaccgcctcctgcatgatgcgcggcccaaggagggagatgatcgccccttcttctggctctttgagaatgtggtggccatgggcgttagtgacaagagggacatctcgcgatttcttgagtctaaccccgtgatgattgacgccaaagaagtgtctgctgcacacagggcccgttacttctggggtaaccttcctggcatgaacaggcctttggcatccactgtgaatgataagctggagctgcaagagtgtctggagcacggcagaatagccaagttcagcaaagtgaggaccattaccaccaggtcaaactctataaagcagggcaaagaccagcatttccccgtcttcatgaacgagaaggaggacatcctgtggtgcactgaaatggaaagggtgtttggcttccccgtccactacacagacgtctccaacatgagccgcttggcgaggcagagactgctgggccgatcgtggagcgtgccggtcatccgccacctcttcgctccgctgaaggaatattttgcttgtgtgtctagcggcaatagtaacgctaacagccgcgggccgagcttcagcagcggcctggtgccgttaagcttgcgcggcagccatatgttcgaaaccgtgcctgtgtggaggagacagccagtccgggtgctgtccctttttgaagacatcaagaaagagctgacgagtttgggctttttggaaagtggttctgacccgggacaactgaagcatgtggttgatgtcacagacacagtgaggaaggatgtggaggagtggggacccttcgatcttgtgtacggcgccacacctcccctgggccacacctgtgaccgtcctcccagctggtacctgttccagttccaccggctcctgcagtacgcacggcccaagccaggcagccccaggcccttcttctggatgttcgtggacaatctggtgctgaacaaggaagacctggacgtcgcatctcgcttcctggagatggagccagtcaccatcccagatgtccacggcggatccttgcagaatgctgtccgcgtgtggagcaacatcccagccataaggagcagcaggcactgggctctggtttcggaagaagaattgtccctgctggcccagaacaagcagagctcgaagctcgcggccaagtggcccaccaagctggtgaagaactgctttctccccctaagagaatatttcaagtatttttcaggagggccgagctctggcgcacccccaccaagtggagggtctcctgccgggtccccaacatctactgaagaaggcaccagcgaatccgcaacgcccgagtcaggccctggtacctccacagaaccatctgaaggtagtgcgcctggttccccagctggaagccctacttccaccgaagaaggcacgtcaaccgaaccaagtgaaggatctgcccctgggaccagcactgaaccatctgagccaaaaaagaagagaaaggtaatggacaagaagtacagcatcggcctggccatcggcaccaactctgtgggctgggccgtgatcaccgacgagtacaaggtgcccagcaagaaattcaaggtgctgggcaacaccgaccggcacagcatcaagaagaacctgatcggcgccctgctgttcgacagcggagaaacagccgaggccacccggctgaagagaaccgccagaagaagatacaccagacggaagaaccggatctgctatctgcaagagatcttcagcaacgagatggccaaggtggacgacagcttcttccacagactggaagagtccttcctggtggaagaggataagaagcacgagcggcaccccatcttcggcaacatcgtggacgaggtggcctaccacgagaagtaccccaccatctaccacctgagaaagaaactggtggacagcaccgacaaggccgacctgcggctgatctatctggccctggcccacatgatcaagttccggggccacttcctgatcgagggcgacctgaaccccgacaacagcgacgtggacaagctgttcatccagctggtgcagacctacaaccagctgttcgaggaaaaccccatcaacgccagcggcgtggacgccaaggccatcctgtctgccagactgagcaagagcagacggctggaaaatctgatcgcccagctgcccggcgagaagaagaatggcctgttcggcaacctgattgccctgagcctgggcctgacccccaacttcaagagcaacttcgacctggccgaggatgccaaactgcagctgagcaaggacacctacgacgacgacctggacaacctgctggcccagatcggcgaccagtacgccgacctgtttctggccgccaagaacctgtccgacgccatcctgctgagcgacatcctgagagtgaacaccgagatcaccaaggcccccctgagcgcctctatgatcaagagatacgacgagcaccaccaggacctgaccctgctgaaagctctcgtgcggcagcagctgcctgagaagtacaaagagattttcttcgaccagagcaagaacggctacgccggctacatcgatggcggagccagccaggaagagttctacaagttcatcaagcccatcctggaaaagatggacggcaccgaggaactgctcgtgaagctgaacagagaggacctgctgcggaagcagcggaccttcgacaacggcagcatcccccaccagatccacctgggagagctgcacgccattctgcggcggcaggaagatttttacccattcctgaaggacaaccgggaaaagatcgagaagatcctgaccttccgcatcccctactacgtgggccctctggccaggggaaacagcagattcgcctggatgaccagaaagagcgaggaaaccatcaccccctggaacttcgaggaagtggtggacaagggcgccagcgcccagagcttcatcgagcggatgaccaacttcgataagaacctgcccaacgagaaggtgctgcccaagcacagcctgctgtacgagtacttcaccgtgtacaacgagctgaccaaagtgaaatacgtgaccgagggaatgagaaagcccgccttcctgagcggcgagcagaaaaaagccatcgtggacctgctgttcaagaccaaccggaaagtgaccgtgaagcagctgaaagaggactacttcaagaaaatcgagtgcttcgactccgtggaaatctccggcgtggaagatcggttcaacgcctccctgggcacataccacgatctgctgaaaattatcaaggacaaggacttcctggacaatgaggaaaacgaggacattctggaagatatcgtgctgaccctgacactgtttgaggacagagagatgatcgaggaacggctgaaaacctatgcccacctgttcgacgacaaagtgatgaagcagctgaagcggcggagatacaccggctggggcaggctgagccggaagctgatcaacggcatccgggacaagcagtccggcaagacaatcctggatttcctgaagtccgacggcttcgccaacagaaacttcatgcagctgatccacgacgacagcctgacctttaaagaggacatccagaaagcccaggtgtccggccagggcgatagcctgcacgagcacattgccaatctggccggcagccccgccattaagaagggcatcctgcagacagtgaaggtggtggacgagctcgtgaaagtgatgggccggcacaagcccgagaacatcgtgatcgaaatggccagagagaaccagaccacccagaagggacagaagaacagccgcgagagaatgaagcggatcgaagagggcatcaaagagctgggcagccagatcctgaaagaacaccccgtggaaaacacccagctgcagaacgagaagctgtacctgtactacctgcagaatgggcgggatatgtacgtggaccaggaactggacatcaaccggctgtccgactacgatgtggacgctatcgtgcctcagagctttctgaaggacgactccatcgataacaaagtgctgactcggagcgacaagaaccggggcaagagcgacaacgtgccctccgaagaggtcgtgaagaagatgaagaactactggcgccagctgctgaatgccaagctgattacccagaggaagttcgacaatctgaccaaggccgagagaggcggcctgagcgaactggataaggccggcttcatcaagagacagctggtggaaacccggcagatcacaaagcacgtggcacagatcctggactcccggatgaacactaagtacgacgagaacgacaaactgatccgggaagtgaaagtgatcaccctgaagtccaagctggtgtccgatttccggaaggatttccagttttacaaagtgcgcgagatcaacaactaccaccacgcccacgacgcctacctgaacgccgtcgtgggaaccgccctgatcaaaaagtaccctaagctggaaagcgagttcgtgtacggcgactacaaggtgtacgacgtgcggaagatgatcgccaagagcgagcaggaaatcggcaaggctaccgccaagtacttcttctacagcaacatcatgaactttttcaagaccgagattaccctggccaacggcgagatccggaagcggcctctgatcgagacaaacggcgaaacaggcgagatcgtgtgggataagggccgggactttgccaccgtgcggaaagtgctgtctatgccccaagtgaatatcgtgaaaaagaccgaggtgcagacaggcggcttcagcaaagagtctatcctgcccaagaggaacagcgacaagctgatcgccagaaagaaggactgggaccctaagaagtacggcggcttcgacagccccaccgtggcctattctgtgctggtggtggccaaagtggaaaagggcaagtccaagaaactgaagagtgtgaaagagctgctggggatcaccatcatggaaagaagcagcttcgagaagaatcccatcgactttctggaagccaagggctacaaagaagtgaaaaaggacctgatcatcaagctgcctaagtactccctgttcgagctggaaaacggccggaagagaatgctggcctctgccggcgaactgcagaagggaaacgaactggccctgccctccaaatatgtgaacttcctgtacctggccagccactatgagaagctgaagggctcccccgaggataatgagcagaaacagctgtttgtggaacagcacaaacactacctggacgagatcatcgagcagatcagcgagttctccaagagagtgatcctggccgacgctaatctggacaaggtgctgagcgcctacaacaagcacagagacaagcctatcagagagcaggccgagaatatcatccacctgtttaccctgaccaatctgggagcccctgccgccttcaagtactttgacaccaccatcgaccggaagaggtacaccagcaccaaagaggtgctggacgccaccctgatccaccagagcatcaccggcctgtacgagacacggatcgacctgtctcagctgggaggcgacgcctatccctatgacgtgcccgattatgccagcctgggcagcggctcccccaagaaaaaacgcaaggtggaagatcctaagaaaaagcggaaagtggacggcctcgagtaatgagatcccaagcacgcagcaatgcagctcaaaacgcttagcctagccacacccccacgggaaacagcagtgattaacctttagcaataaacgaaagtttaactaagctatactaaccccagggttggtcaatttcgtgccagccacaccctggtactgcatgcacgcaatgctagctgcccctttcccgtcctgggcaccccgagtctcccccgaccccgggtcccaggtatgctcccacctccacctgccccactcaccacctctgctagttccagacacctccgagacgagg

SEQ ID NO: 291 - RNA, 6967 nt, synthetic construct
  misc_feature 1..6967: note = V39 mRNA
  source 1..6967: mol_type = other RNA
aggactcactatttgttttcgcgcccagttgcaaaaagtgtcgacatttgcttctgacacaactgtgttcactagcaacctcaaacagacaccgccaccatggtgcctgccgccaagagagtgaagctggacggcagcaaccacgaccaagagttcgaccctcctaaggtgtaccctcctgtgccagccgagaagcggaagcctatcagagtgctgagcctgttcgacggaatcgccacaggactgctggtgctgaaggatctgggaatccaggtggaccggtatatcgccagcgaagtgtgcgaggacagcatcacagttggcatggttcgacaccagggcaagattatgtacgtgggcgacgtgcggagcgtgacccagaaacacattcaagagtggggccccttcgacctggttatcggcggcagcccttgcaacgatctgagcatcgtgaaccccgccagaaagggcctgtatgaaggcaccggcagactgttcttcgagttctacagactgctgcacgacgccagacctaaagagggcgacgacagaccattcttctggctgttcgagaacgtggtggctatgggcgtgtccgacaagcgggacatcagccggtttctggaaagcaaccccgtgatgatcgacgccaaagaggtgtccgctgctcaccgggccagatacttttggggcaatctgcccggcatgaacagacctctggccagcaccgtgaacgacaagctggaactgcaagagtgcctggaacacggccggatcgccaagtttagcaaagtgcggaccatcaccaccaggtccaacagcatcaagcagggcaaagaccagcacttccccgtgttcatgaatgagaaagaggacatcctgtggtgcaccgagatggaaagagtgttcggcttccctgtgcactacaccgacgtgtccaacatgagcagactggccagacagaggctgctgggcagatcttggagcgtgccagtgatcagacacctgttcgcccctctgaaagaatacttcgcctgcgtgtccagcggcaacagcaacgccaatagcagaggccctagcttcagctctggactggtgcctttgagcctgagaggcagccacatgttcgagacagtgcctgtgtggcggagacagcccgttagagtgctgtccctgtttgaggacatcaagaaagagctgaccagcctgggcttcctggaaagcggatctgatcctggccagctgaagcacgtggtggacgtgaccgataccgtgcggaaggatgtggaagaatggggcccttttgatctggtgtacggcgccacacctcctctgggccacacatgtgatagacctccaagctggtatctgttccagttccaccggctgctgcagtacgctagacccaagcctggaagccccaggcctttcttttggatgttcgtggacaacctggtcctgaacaaagaggacctggacgtcgccagccggttcctcgaaatggaacctgtgacaatccccgacgtgcacggcggatctctgcagaatgctgtcagagtgtggtctaacatccccgccatcagaagcagcagacactgggcccttgtgtccgaggaagaactgtctctgctggcccagaacaagcagagcagcaagctggccgccaagtggcctacaaagctggtcaagaactgcttcctgcctctgcgcgagtacttcaagtatttcagcggcggacctagctctggcgcccctccacctagcggaggatctccagcaggatctcctaccagcaccgaggaaggcacaagcgagtctgccacacctgagtctggccctggcacatctacagagcctagcgagggatctgcccctggatctcctgctggcagccctacatctaccgaagagggaaccagcacagagccttccgaaggttctgctcctggcacaagcaccgagccaagcgagatgaacaacagccagggcagagtgaccttcgaggatgtgaccgtgaacttcacccaaggcgagtggcagagactgaaccccgagcagagaaacctgtaccgggacgtgatgctggaaaactacagcaacctggtgtccgtcggccagggcgagacaacaaagcctgacgtgatcctgcggctggaacagggaaaagagccttggctggaagaggaagaggtgctcggatctggacgggccgagaagaacggcgatattggcggacagatctggaagcctaaggacgtgaaagagagcctgagcggctctgaaacacctggaacaagcgaaggcggaccaggcacctctaccgaaccatctgagggaagcgctccaggttctcctgccggctctccaacaagcacagaagagggcacctccactgagccctctgaaggcagtgctcctggaacttccaccgaaccttccgagccaaagaagaaacgcaaggtgggctccgacaagaagtacagcatcggcctggccatcggcaccaactctgtgggctgggccgtgatcaccgacgagtacaaggtgcccagcaagaaattcaaggtgctgggcaacaccgaccggcacagcatcaagaagaacctgatcggcgccctgctgttcgacagcggagaaacagccgaggccacccggctgaagagaaccgccagaagaagatacaccagacggaagaaccggatctgctatctgcaagagatcttcagcaacgagatggccaaggtggacgacagcttcttccacagactggaagagtccttcctggtggaagaggataagaagcacgagcggcaccccatcttcggcaacatcgtggacgaggtggcctaccacgagaagtaccccaccatctaccacctgagaaagaaactggtggacagcaccgacaaggccgacctgcggctgatctatctggccctggcccacatgatcaagttccggggccacttcctgatcgagggcgacctgaaccccgacaacagcgacgtggacaagctgttcatccagctggtgcagacctacaaccagctgttcgaggaaaaccccatcaacgccagcggcgtggacgccaaggccatcctgtctgccagactgagcaagagcagacggctggaaaatctgatcgcccagctgcccggcgagaagaagaatggcctgttcggcaacctgattgccctgagcctgggcctgacccccaacttcaagagcaacttcgacctggccgaggatgccaaactgcagctgagcaaggacacctacgacgacgacctggacaacctgctggcccagatcggcgaccagtacgccgacctgtttctggccgccaagaacctgtccgacgccatcctgctgagcgacatcctgagagtgaacaccgagatcaccaaggcccccctgagcgcctctatgatcaagagatacgacgagcaccaccaggacctgaccctgctgaaagctctcgtgcggcagcagctgcctgagaagtacaaagagattttcttcgaccagagcaagaacggctacgccggctacatcgatggcggagccagccaggaagagttctacaagttcatcaagcccatcctggaaaagatggacggcaccgaggaactgctcgtgaagctgaacagagaggacctgctgcggaagcagcggaccttcgacaacggcagcatcccccaccagatccacctgggagagctgcacgccattctgcggcggcaggaagatttttacccattcctgaaggacaaccgggaaaagatcgagaagatcctgaccttccgcatcccctactacgtgggccctctggccaggggaaacagcagattcgcctggatgaccagaaagagcgaggaaaccatcaccccctggaacttcgaggaagtggtggacaagggcgccagcgcccagagcttcatcgagcggatgaccaacttcgataagaacctgcccaacgagaaggtgctgcccaagcacagcctgctgtacgagtacttcaccgtgtacaacgagctgaccaaagtgaaatacgtgaccgagggaatgagaaagcccgccttcctgagcggcgagcagaaaaaagccatcgtggacctgctgttcaagaccaaccggaaagtgaccgtgaagcagctgaaagaggactacttcaagaaaatcgagtgcttcgactccgtggaaatctccggcgtggaagatcggttcaacgcctccctgggcacataccacgatctgctgaaaattatcaaggacaaggacttcctggacaatgaggaaaacgaggacattctggaagatatcgtgctgaccctgacactgtttgaggacagagagatgatcgaggaacggctgaaaacctatgcccacctgttcgacgacaaagtgatgaagcagctgaagcggcggagatacaccggctggggcaggctgagccggaagctgatcaacggcatccgggacaagcagtccggcaagacaatcctggatttcctgaagtccgacggcttcgccaacagaaacttcatgcagctgatccacgacgacagcctgacctttaaagaggacatccagaaagcccaggtgtccggccagggcgatagcctgcacgagcacattgccaatctggccggcagccccgccattaagaagggcatcctgcagacagtgaaggtggtggacgagctcgtgaaagtgatgggccggcacaagcccgagaacatcgtgatcgaaatggccagagagaaccagaccacccagaagggacagaagaacagccgcgagagaatgaagcggatcgaagagggcatcaaagagctgggcagccagatcctgaaagaacaccccgtggaaaacacccagctgcagaacgagaagctgtacctgtactacctgcagaatgggcgggatatgtacgtggaccaggaactggacatcaaccggctgtccgactacgatgtggacgctatcgtgcctcagagctttctgaaggacgactccatcgataacaaagtgctgactcggagcgacaagaaccggggcaagagcgacaacgtgccctccgaagaggtcgtgaagaagatgaagaactactggcgccagctgctgaatgccaagctgattacccagaggaagttcgacaatctgaccaaggccgagagaggcggcctgagcgaactggataaggccggcttcatcaagagacagctggtggaaacccggcagatcacaaagcacgtggcacagatcctggactcccggatgaacactaagtacgacgagaacgacaaactgatccgggaagtgaaagtgatcaccctgaagtccaagctggtgtccgatttccggaaggatttccagttttacaaagtgcgcgagatcaacaactaccaccacgcccacgacgcctacctgaacgccgtcgtgggaaccgccctgatcaaaaagtaccctaagctggaaagcgagttcgtgtacggcgactacaaggtgtacgacgtgcggaagatgatcgccaagagcgagcaggaaatcggcaaggctaccgccaagtacttcttctacagcaacatcatgaactttttcaagaccgagattaccctggccaacggcgagatccggaagcggcctctgatcgagacaaacggcgaaacaggcgagatcgtgtgggataagggccgggactttgccaccgtgcggaaagtgctgtctatgccccaagtgaatatcgtgaaaaagaccgaggtgcagacaggcggcttcagcaaagagtctatcctgcccaagaggaacagcgacaagctgatcgccagaaagaaggactgggaccctaagaagtacggcggcttcgacagccccaccgtggcctattctgtgctggtggtggccaaagtggaaaagggcaagtccaagaaactgaagagtgtgaaagagctgctggggatcaccatcatggaaagaagcagcttcgagaagaatcccatcgactttctggaagccaagggctacaaagaagtgaaaaaggacctgatcatcaagctgcctaagtactccctgttcgagctggaaaacggccggaagagaatgctggcctctgccggcgaactgcagaagggaaacgaactggccctgccctccaaatatgtgaacttcctgtacctggccagccactatgagaagctgaagggctcccccgaggataatgagcagaaacagctgtttgtggaacagcacaaacactacctggacgagatcatcgagcagatcagcgagttctccaagagagtgatcctggccgacgctaatctggacaaggtgctgagcgcctacaacaagcacagagacaagcctatcagagagcaggccgagaatatcatccacctgtttaccctgaccaatctgggagcccctgccgccttcaagtactttgacaccaccatcgaccggaagaggtacaccagcaccaaagaggtgctggacgccaccctgatccaccagagcatcaccggcctgtacgagacacggatcgacctgtctcagctgggaggcgacgcctatccctatgacgtgcccgattatgccagcctgggcagcggctcccccaagaaaaaacgcaaggtggaagatcctaagaaaaagcggaaagtgtgataatagggatcccaagcacgcagcaatgcagctcaaaacgcttagcctagccacacccccacgggaaacagcagtgattaacctttagcaataaacgaaagtttaactaagctatactaaccccagggttggtcaatttcgtgccagccacaccctggtactgcatgcacgcaatgctagctgcccctttcccgtcctgggcaccccgagtctcccccgaccccgggtcccaggtatgctcccacctccacctgccccactcaccacctctgctagttccagacacctccgaagatgg

SEQ ID NO: 292 - RNA, 6862 nt, synthetic construct
  misc_feature 1..6862: note = V40 mRNA
  source 1..6862: mol_type = other RNA
aggactcactatttgttttcgcgcccagttgcaaaaagtgtcgacatttgcttctgacacaactgtgttcactagcaacctcaaacagacaccgccaccatgcctgctgctaagagagtgaaactggatggatccaaccatgaccaggaatttgaccccccaaaggtttacccacctgtgccagctgagaagaggaagcccatccgcgtgctgtctctctttgatgggattgctacagggctcctggtgctgaaggacctgggcatccaagtggaccgctacattgcctccgaggtgtgtgaggactccatcacggtgggcatggtgcggcaccagggaaagatcatgtacgtcggggacgtccgcagcgtcacacagaagcatatccaggagtggggcccattcgacctggtgattggaggcagtccctgcaatgacctctccattgtcaaccctgcccgcaagggactttatgagggtactggccgcctcttctttgagttctaccgcctcctgcatgatgcgcggcccaaggagggagatgatcgccccttcttctggctctttgagaatgtggtggccatgggcgttagtgacaagagggacatctcgcgatttcttgagtctaaccccgtgatgattgacgccaaagaagtgtctgctgcacacagggcccgttacttctggggtaaccttcctggcatgaacaggcctttggcatccactgtgaatgataagctggagctgcaagagtgtctggagcacggcagaatagccaagttcagcaaagtgaggaccattaccaccaggtcaaactctataaagcagggcaaagaccagcatttccccgtcttcatgaacgagaaggaggacatcctgtggtgcactgaaatggaaagggtgtttggcttccccgtccactacacagacgtctccaacatgagccgcttggcgaggcagagactgctgggccgatcgtggagcgtgccggtcatccgccacctcttcgctccgctgaaggaatattttgcttgtgtgtctagcggcaatagtaacgctaacagccgcgggccgagcttcagcagcggcctggtgccgttaagcttgcgcggcagccatatgttcgaaaccgtgcctgtgtggaggagacagccagtccgggtgctgtccctttttgaagacatcaagaaagagctgacgagtttgggctttttggaaagtggttctgacccgggacaactgaagcatgtggttgatgtcacagacacagtgaggaaggatgtggaggagtggggacccttcgatcttgtgtacggcgccacacctcccctgggccacacctgtgaccgtcctcccagctggtacctgttccagttccaccggctcctgcagtacgcacggcccaagccaggcagccccaggcccttcttctggatgttcgtggacaatctggtgctgaacaaggaagacctggacgtcgcatctcgcttcctggagatggagccagtcaccatcccagatgtccacggcggatccttgcagaatgctgtccgcgtgtggagcaacatcccagccataaggagcagcaggcactgggctctggtttcggaagaagaattgtccctgctggcccagaacaagcagagctcgaagctcgcggccaagtggcccaccaagctggtgaagaactgctttctccccctaagagaatatttcaagtatttttcaggagggccgagctctggcgcacccccaccaagtggagggtctcctgccgggtccccaacatctactgaagaaggcaccagcgaatccgcaacgcccgagtcaggccctggtacctccacagaaccatctgaaggtagtgcgcctggttccccagctggaagccctacttccaccgaagaaggcacgtcaaccgaaccaagtgaaggatctgcccctgggaccagcactgaaccatctgagcggacactcgagctgttccgcgacgtggccattgtgttctctcaagaggaatggcagtggctggcccctgctcagagagatctctaccgcgacgttatgctggagacatactccaatctcgtgtccctcggcctggccgtgtccaaacctgatgtgatcagcttcctcgagcagggaaaagaaccttggatgagcggcagcgagacccccggtaccagcgagtccggccctggcacctccacagaaccatctgaaggtagtgcgcctggttccccagctggaagccctacttccaccgaagaaggcacgtcaaccgaaccaagtgaaggatctgcccctgggaccagcactgaaccatctgagccaaaaaagaagagaaaggtaatggacaagaagtacagcatcggcctggccatcggcaccaactctgtgggctgggccgtgatcaccgacgagtacaaggtgcccagcaagaaattcaaggtgctgggcaacaccgaccggcacagcatcaagaagaacctgatcggcgccctgctgttcgacagcggagaaacagccgaggccacccggctgaagagaaccgccagaagaagatacaccagacggaagaaccggatctgctatctgcaagagatcttcagcaacgagatggccaaggtggacgacagcttcttccacagactggaagagtccttcctggtggaagaggataagaagcacgagcggcaccccatcttcggcaacatcgtggacgaggtggcctaccacgagaagtaccccaccatctaccacctgagaaagaaactggtggacagcaccgacaaggccgacctgcggctgatctatctggccctggcccacatgatcaagttccggggccacttcctgatcgagggcgacctgaaccccgacaacagcgacgtggacaagctgttcatccagctggtgcagacctacaaccagctgttcgaggaaaaccccatcaacgccagcggcgtggacgccaaggccatcctgtctgccagactgagcaagagcagacggctggaaaatctgatcgcccagctgcccggcgagaagaagaatggcctgttcggcaacctgattgccctgagcctgggcctgacccccaacttcaagagcaacttcgacctggccgaggatgccaaactgcagctgagcaaggacacctacgacgacgacctggacaacctgctggcccagatcggcgaccagtacgccgacctgtttctggccgccaagaacctgtccgacgccatcctgctgagcgacatcctgagagtgaacaccgagatcaccaaggcccccctgagcgcctctatgatcaagagatacgacgagcaccaccaggacctgaccctgctgaaagctctcgtgcggcagcagctgcctgagaagtacaaagagattttcttcgaccagagcaagaacggctacgccggctacatcgatggcggagccagccaggaagagttctacaagttcatcaagcccatcctggaaaagatggacggcaccgaggaactgctcgtgaagctgaacagagaggacctgctgcggaagcagcggaccttcgacaacggcagcatcccccaccagatccacctgggagagctgcacgccattctgcggcggcaggaagatttttacccattcctgaaggacaaccgggaaaagatcgagaagatcctgaccttccgcatcccctactacgtgggccctctggccaggggaaacagcagattcgcctggatgaccagaaagagcgaggaaaccatcaccccctggaacttcgaggaagtggtggacaagggcgccagcgcccagagcttcatcgagcggatgaccaacttcgataagaacctgcccaacgagaaggtgctgcccaagcacagcctgctgtacgagtacttcaccgtgtacaacgagctgaccaaagtgaaatacgtgaccgagggaatgagaaagcccgccttcctgagcggcgagcagaaaaaagccatcgtggacctgctgttcaagaccaaccggaaagtgaccgtgaagcagctgaaagaggactacttcaagaaaatcgagtgcttcgactccgtggaaatctccggcgtggaagatcggttcaacgcctccctgggcacataccacgatctgctgaaaattatcaaggacaaggacttcctggacaatgaggaaaacgaggacattctggaagatatcgtgctgaccctgacactgtttgaggacagagagatgatcgaggaacggctgaaaacctatgcccacctgttcgacgacaaagtgatgaagcagctgaagcggcggagatacaccggctggggcaggctgagccggaagctgatcaacggcatccgggacaagcagtccggcaagacaatcctggatttcctgaagtccgacggcttcgccaacagaaacttcatgcagctgatccacgacgacagcctgacctttaaagaggacatccagaaagcccaggtgtccggccagggcgatagcctgcacgagcacattgccaatctggccggcagccccgccattaagaagggcatcctgcagacagtgaaggtggtggacgagctcgtgaaagtgatgggccggcacaagcccgagaacatcgtgatcgaaatggccagagagaaccagaccacccagaagggacagaagaacagccgcgagagaatgaagcggatcgaagagggcatcaaagagctgggcagccagatcctgaaagaacaccccgtggaaaacacccagctgcagaacgagaagctgtacctgtactacctgcagaatgggcgggatatgtacgtggaccaggaactggacatcaaccggctgtccgactacgatgtggacgctatcgtgcctcagagctttctgaaggacgactccatcgataacaaagtgctgactcggagcgacaagaaccggggcaagagcgacaacgtgccctccgaagaggtcgtgaagaagatgaagaactactggcgccagctgctgaatgccaagctgattacccagaggaagttcgacaatctgaccaaggccgagagaggcggcctgagcgaactggataaggccggcttcatcaagagacagctggtggaaacccggcagatcacaaagcacgtggcacagatcctggactcccggatgaacactaagtacgacgagaacgacaaactgatccgggaagtgaaagtgatcaccctgaagtccaagctggtgtccgatttccggaaggatttccagttttacaaagtgcgcgagatcaacaactaccaccacgcccacgacgcctacctgaacgccgtcgtgggaaccgccctgatcaaaaagtaccctaagctggaaagcgagttcgtgtacggcgactacaaggtgtacgacgtgcggaagatgatcgccaagagcgagcaggaaatcggcaaggctaccgccaagtacttcttctacagcaacatcatgaactttttcaagaccgagattaccctggccaacggcgagatccggaagcggcctctgatcgagacaaacggcgaaacaggcgagatcgtgtgggataagggccgggactttgccaccgtgcggaaagtgctgtctatgccccaagtgaatatcgtgaaaaagaccgaggtgcagacaggcggcttcagcaaagagtctatcctgcccaagaggaacagcgacaagctgatcgccagaaagaaggactgggaccctaagaagtacggcggcttcgacagccccaccgtggcctattctgtgctggtggtggccaaagtggaaaagggcaagtccaagaaactgaagagtgtgaaagagctgctggggatcaccatcatggaaagaagcagcttcgagaagaatcccatcgactttctggaagccaagggctacaaagaagtgaaaaaggacctgatcatcaagctgcctaagtactccctgttcgagctggaaaacggccggaagagaatgctggcctctgccggcgaactgcagaagggaaacgaactggccctgccctccaaatatgtgaacttcctgtacctggccagccactatgagaagctgaagggctcccccgaggataatgagcagaaacagctgtttgtggaacagcacaaacactacctggacgagatcatcgagcagatcagcgagttctccaagagagtgatcctggccgacgctaatctggacaaggtgctgagcgcctacaacaagcacagagacaagcctatcagagagcaggccgagaatatcatccacctgtttaccctgaccaatctgggagcccctgccgccttcaagtactttgacaccaccatcgaccggaagaggtacaccagcaccaaagaggtgctggacgccaccctgatccaccagagcatcaccggcctgtacgagacacggatcgacctgtctcagctgggaggcgacgcctatccctatgacgtgcccgattatgccagcctgggcagcggctcccccaagaaaaaacgcaaggtggaagatcctaagaaaaagcggaaagtggacggcctcgagtaatgagatcccaagcacgcagcaatgcagctcaaaacgcttagcctagccacacccccacgggaaacagcagtgattaacctttagcaataaacgaaagtttaactaagctatactaaccccagggttggtcaatttcgtgccagccacaccctggtactgcatgcacgcaatgctagctgcccctttcccgtcctgggcaccccgagtctcccccgaccccgggtcccaggtatgctcccacctccacctgccccactcaccacctctgctagttccagacacctccgagacgagg

SEQ ID NO: 293 - RNA, 6862 nt, synthetic construct
  misc_feature 1..6862: note = V41 mRNA
  source 1..6862: mol_type = other RNA
aggactcactatttgttttcgcgcccagttgcaaaaagtgtcgacatttgcttctgacacaactgtgttcactagcaacctcaaacagacaccgccaccatgcctgctgctaagagagtgaaactggatggatccaaccatgaccaggaatttgaccccccaaaggtttacccacctgtgccagctgagaagaggaagcccatccgcgtgctgtctctctttgatgggattgctacagggctcctggtgctgaaggacctgggcatccaagtggaccgctacattgcctccgaggtgtgtgaggactccatcacggtgggcatggtgcggcaccagggaaagatcatgtacgtcggggacgtccgcagcgtcacacagaagcatatccaggagtggggcccattcgacctggtgattggaggcagtccctgcaatgacctctccattgtcaaccctgcccgcaagggactttatgagggtactggccgcctcttctttgagttctaccgcctcctgcatgatgcgcggcccaaggagggagatgatcgccccttcttctggctctttgagaatgtggtggccatgggcgttagtgacaagagggacatctcgcgatttcttgagtctaaccccgtgatgattgacgccaaagaagtgtctgctgcacacagggcccgttacttctggggtaaccttcctggcatgaacaggcctttggcatccactgtgaatgataagctggagctgcaagagtgtctggagcacggcagaatagccaagttcagcaaagtgaggaccattaccaccaggtcaaactctataaagcagggcaaagaccagcatttccccgtcttcatgaacgagaaggaggacatcctgtggtgcactgaaatggaaagggtgtttggcttccccgtccactacacagacgtctccaacatgagccgcttggcgaggcagagactgctgggccgatcgtggagcgtgccggtcatccgccacctcttcgctccgctgaaggaatattttgcttgtgtgtctagcggcaatagtaacgctaacagccgcgggccgagcttcagcagcggcctggtgccgttaagcttgcgcggcagccatatgttcgaaaccgtgcctgtgtggaggagacagccagtccgggtgctgtccctttttgaagacatcaagaaagagctgacgagtttgggctttttggaaagtggttctgacccgggacaactgaagcatgtggttgatgtcacagacacagtgaggaaggatgtggaggagtggggacccttcgatcttgtgtacggcgccacacctcccctgggccacacctgtgaccgtcctcccagctggtacctgttccagttccaccggctcctgcagtacgcacggcccaagccaggcagccccaggcccttcttctggatgttcgtggacaatctggtgctgaacaaggaagacctggacgtcgcatctcgcttcctggagatggagccagtcaccatcccagatgtccacggcggatccttgcagaatgctgtccgcgtgtggagcaacatcccagccataaggagcagcaggcactgggctctggtttcggaagaagaattgtccctgctggcccagaacaagcagagctcgaagctcgcggccaagtggcccaccaagctggtgaagaactgctttctccccctaagagaatatttcaagtatttttcaggagggccgagctctggcgcacccccaccaagtggagggtctcctgccgggtccccaacatctactgaagaaggcaccagcgaatccgcaacgcccgagtcaggccctggtacctccacagaaccatctgaaggtagtgcgcctggttccccagctggaagccctacttccaccgaagaaggcacgtcaaccgaaccaagtgaaggatctgcccctgggaccagcactgaaccatctgagcggacactcatggcctttgaggacgtcgccgtgtatttttcccaagaagaatggggactgctcgacactgcccagagagccctgtatcgcagagtcatgctggacaacttcgccctggtggcctccctgggcctgtctacaagcagacccagagtggtcattcagctggaaagaggcgaggaaccctgggtcagcggcagcgagacccccggtaccagcgagggcggccctggcacctccacagaaccatctgaaggtagtgcgcctggttccccagctggaagccctacttccaccgaagaaggcacgtcaaccgaaccaagtgaaggatctgcccctgggaccagcactgaaccatctgagccaaaaaagaagagaaaggtaatggacaagaagtacagcatcggcctggccatcggcaccaactctgtgggctgggccgtgatcaccgacgagtacaaggtgcccagcaagaaattcaaggtgctgggcaacaccgaccggcacagcatcaagaagaacctgatcggcgccctgctgttcgacagcggagaaacagccgaggccacccggctgaagagaaccgccagaagaagatacaccagacggaagaaccggatctgctatctgcaagagatcttcagcaacgagatggccaaggtggacgacagcttcttccacagactggaagagtccttcctggtggaagaggataagaagcacgagcggcaccccatcttcggcaacatcgtggacgaggtggcctaccacgagaagtaccccaccatctaccacctgagaaagaaactggtggacagcaccgacaaggccgacctgcggctgatctatctggccctggcccacatgatcaagttccggggccacttcctgatcgagggcgacctgaaccccgacaacagcgacgtggacaagctgttcatccagctggtgcagacctacaaccagctgttcgaggaaaaccccatcaacgccagcggcgtggacgccaaggccatcctgtctgccagactgagcaagagcagacggctggaaaatctgatcgcccagctgcccggcgagaagaagaatggcctgttcggcaacctgattgccctgagcctgggcctgacccccaacttcaagagcaacttcgacctggccgaggatgccaaactgcagctgagcaaggacacctacgacgacgacctggacaacctgctggcccagatcggcgaccagtacgccgacctgtttctggccgccaagaacctgtccgacgccatcctgctgagcgacatcctgagagtgaacaccgagatcaccaaggcccccctgagcgcctctatgatcaagagatacgacgagcaccaccaggacctgaccctgctgaaagctctcgtgcggcagcagctgcctgagaagtacaaagagattttcttcgaccagagcaagaacggctacgccggctacatcgatggcggagccagccaggaagagttctacaagttcatcaagcccatcctggaaaagatggacggcaccgaggaactgctcgtgaagctgaacagagaggacctgctgcggaagcagcggaccttcgacaacggcagcatcccccaccagatccacctgggagagctgcacgccattctgcggcggcaggaagatttttacccattcctgaaggacaaccgggaaaagatcgagaagatcctgaccttccgcatcccctactacgtgggccctctggccaggggaaacagcagattcgcctggatgaccagaaagagcgaggaaaccatcaccccctggaacttcgaggaagtggtggacaagggcgccagcgcccagagcttcatcgagcggatgaccaacttcgataagaacctgcccaacgagaaggtgctgcccaagcacagcctgctgtacgagtacttcaccgtgtacaacgagctgaccaaagtgaaatacgtgaccgagggaatgagaaagcccgccttcctgagcggcgagcagaaaaaagccatcgtggacctgctgttcaagaccaaccggaaagtgaccgtgaagcagctgaaagaggactacttcaagaaaatcgagtgcttcgactccgtggaaatctccggcgtggaagatcggttcaacgcctccctgggcacataccacgatctgctgaaaattatcaaggacaaggacttcctggacaatgaggaaaacgaggacattctggaagatatcgtgctgaccctgacactgtttgaggacagagagatgatcgaggaacggctgaaaacctatgcccacctgttcgacgacaaagtgatgaagcagctgaagcggcggagatacaccggctggggcaggctgagccggaagctgatcaacggcatccgggacaagcagtccggcaagacaatcctggatttcctgaagtccgacggcttcgccaacagaaacttcatgcagctgatccacgacgacagcctgacctttaaagaggacatccagaaagcccaggtgtccggccagggcgatagcctgcacgagcacattgccaatctggccggcagccccgccattaagaagggcatcctgcagacagtgaaggtggtggacgagctcgtgaaagtgatgggccggcacaagcccgagaacatcgtgatcgaaatggccagagagaaccagaccacccagaagggacagaagaacagccgcgagagaatgaagcggatcgaagagggcatcaaagagctgggcagccagatcctgaaagaacaccccgtggaaaacacccagctgcagaacgagaagctgtacctgtactacctgcagaatgggcgggatatgtacgtggaccaggaactggacatcaaccggctgtccgactacgatgtggacgctatcgtgcctcagagctttctgaaggacgactccatcgataacaaagtgctgactcggagcgacaagaaccggggcaagagcgacaacgtgccctccgaagaggtcgtgaagaagatgaagaactactggcgccagctgctgaatgccaagctgattacccagaggaagttcgacaatctgaccaaggccgagagaggcggcctgagcgaactggataaggccggcttcatcaagagacagctggtggaaacccggcagatcacaaagcacgtggcacagatcctggactcccggatgaacactaagtacgacgagaacgacaaactgatccgggaagtgaaagtgatcaccctgaagtccaagctggtgtccgatttccggaaggatttccagttttacaaagtgcgcgagatcaacaactaccaccacgcccacgacgcctacctgaacgccgtcgtgggaaccgccctgatcaaaaagtaccctaagctggaaagcgagttcgtgtacggcgactacaaggtgtacgacgtgcggaagatgatcgccaagagcgagcaggaaatcggcaaggctaccgccaagtacttcttctacagcaacatcatgaactttttcaagaccgagattaccctggccaacggcgagatccggaagcggcctctgatcgagacaaacggcgaaacaggcgagatcgtgtgggataagggccgggactttgccaccgtgcggaaagtgctgtctatgccccaagtgaatatcgtgaaaaagaccgaggtgcagacaggcggcttcagcaaagagtctatcctgcccaagaggaacagcgacaagctgatcgccagaaagaaggactgggaccctaagaagtacggcggcttcgacagccccaccgtggcctattctgtgctggtggtggccaaagtggaaaagggcaagtccaagaaactgaagagtgtgaaagagctgctggggatcaccatcatggaaagaagcagcttcgagaagaatcccatcgactttctggaagccaagggctacaaagaagtgaaaaaggacctgatcatcaagctgcctaagtactccctgttcgagctggaaaacggccggaagagaatgctggcctctgccggcgaactgcagaagggaaacgaactggccctgccctccaaatatgtgaacttcctgtacctggccagccactatgagaagctgaagggctcccccgaggataatgagcagaaacagctgtttgtggaacagcacaaacactacctggacgagatcatcgagcagatcagcgagttctccaagagagtgatcctggccgacgctaatctggacaaggtgctgagcgcctacaacaagcacagagacaagcctatcagagagcaggccgagaatatcatccacctgtttaccctgaccaatctgggagcccctgccgccttcaagtactttgacaccaccatcgaccggaagaggtacaccagcaccaaagaggtgctggacgccaccctgatccaccagagcatcaccggcctgtacgagacacggatcgacctgtctcagctgggaggcgacgcctatccctatgacgtgcccgattatgccagcctgggcagcggctcccccaagaaaaaacgcaaggtggaagatcctaagaaaaagcggaaagtggacggcctcgagtaatgagatcccaagcacgcagcaatgcagctcaaaacgcttagcctagccacacccccacgggaaacagcagtgattaacctttagcaataaacgaaagtttaactaagctatactaaccccagggttggtcaatttcgtgccagccacaccctggtactgcatgcacgcaatgctagctgcccctttcccgtcctgggcaccccgagtctcccccgaccccgggtcccaggtatgctcccacctccacctgccccactcaccacctctgctagttccagacacctccgagacgagg

SEQ ID NO: 294 - RNA, 7666 nt, synthetic construct
  misc_feature 1..7666: note = V42 mRNA
  source 1..7666: mol_type = other RNA
aggactcactatttgttttcgcgcccagttgcaaaaagtgtcgacatttgcttctgacacaactgtgttcactagcaacctcaaacagacaccgccaccatgcctgctgctaagagagtgaaactggatggatccaaccatgaccaggaatttgaccccccaaaggtttacccacctgtgccagctgagaagaggaagcccatccgcgtgctgtctctctttgatgggattgctacagggctcctggtgctgaaggacctgggcatccaagtggaccgctacattgcctccgaggtgtgtgaggactccatcacggtgggcatggtgcggcaccagggaaagatcatgtacgtcggggacgtccgcagcgtcacacagaagcatatccaggagtggggcccattcgacctggtgattggaggcagtccctgcaatgacctctccattgtcaaccctgcccgcaagggactttatgagggtactggccgcctcttctttgagttctaccgcctcctgcatgatgcgcggcccaaggagggagatgatcgccccttcttctggctctttgagaatgtggtggccatgggcgttagtgacaagagggacatctcgcgatttcttgagtctaaccccgtgatgattgacgccaaagaagtgtctgctgcacacagggcccgttacttctggggtaaccttcctggcatgaacaggcctttggcatccactgtgaatgataagctggagctgcaagagtgtctggagcacggcagaatagccaagttcagcaaagtgaggaccattaccaccaggtcaaactctataaagcagggcaaagaccagcatttccccgtcttcatgaacgagaaggaggacatcctgtggtgcactgaaatggaaagggtgtttggcttccccgtccactacacagacgtctccaacatgagccgcttggcgaggcagagactgctgggccgatcgtggagcgtgccggtcatccgccacctcttcgctccgctgaaggaatattttgcttgtgtgtctagcggcaatagtaacgctaacagccgcgggccgagcttcagcagcggcctggtgccgttaagcttgcgcggcagccatatgttcgaaaccgtgcctgtgtggaggagacagccagtccgggtgctgtccctttttgaagacatcaagaaagagctgacgagtttgggctttttggaaagtggttctgacccgggacaactgaagcatgtggttgatgtcacagacacagtgaggaaggatgtggaggagtggggacccttcgatcttgtgtacggcgccacacctcccctgggccacacctgtgaccgtcctcccagctggtacctgttccagttccaccggctcctgcagtacgcacggcccaagccaggcagccccaggcccttcttctggatgttcgtggacaatctggtgctgaacaaggaagacctggacgtcgcatctcgcttcctggagatggagccagtcaccatcccagatgtccacggcggatccttgcagaatgctgtccgcgtgtggagcaacatcccagccataaggagcagcaggcactgggctctggtttcggaagaagaattgtccctgctggcccagaacaagcagagctcgaagctcgcggccaagtggcccaccaagctggtgaagaactgctttctccccctaagagaatatttcaagtatttttcaggagggccgagctctggcagcgagctgattaaggagaacatgcacatgaagctgtacatggagggcaccgtggacaaccatcacttcaagtgcacatccgagggcgaaggcaagccctacgagggcacccagaccatgagaatcaaggtggtcgagggcggccctctccccttcgccttcgacatcctggctactagcttcctctacggcagcaagaccttcatcaaccacacccagggcatccccgacttcttcaagcagtccttccctgagggcttcacatgggagagagtcaccacatacgaagacgggggcgtgctgaccgctacccaggacaccagcctccaggacggctgcctcatctacaacgtcaagatcagaggggtgaacttcacatccaacggccctgtgatgcagaagaaaacactcggctgggaggccttcaccgaaacgctgtaccccgctgacggcggcctggaaggcagaaacgacatggccctgaagctcgtgggcgggagccatctgatcgcaaacatcaagaccacatatagatccaagaaacccgctaagaacctcaagatgcctggcgtctactatgtggactacagactggaaagaatcaaggaggccaacaacgagacctacgtcgagcagcacgaggtggcagtggccagatactgcgacctccctagcaaactggggcacaagcttaatgcacccccaccaagtggagggtctcctgccgggtccccaacatctactgaagaaggcaccagcgaatccgcaacgcccgagtcaggccctggtacctccacagaaccatctgaaggtagtgcgcctggttccccagctggaagccctacttccaccgaagaaggcacgtcaaccgaaccaagtgaaggatctgcccctgggaccagcactgaaccatctgagatgaacaattcccagggaagagtgaccttcgaggacgtgaccgtgaacttcacccaaggcgagtggcagagactgaaccccgagcagagaaacctgtaccgggacgtgatgctggaaaactacagcaacctggtgtccgtcggccagggcgagacaacaaagcctgacgtgatcctgcggctggaacagggcaaagagccttggctggaagaggaagaggtgctcggatctggcagagccgagaagaatggcgatatcggcggacagatctggaagccaaaggatgtgaaagagagtctcagcggcagcgagacccccggtaccagcgagggcggccctggcacctccacagaaccatctgaaggtagtgcgcctggttccccagctggaagccctacttccaccgaagaaggcacgtcaaccgaaccaagtgaaggatctgcccctgggaccagcactgaaccatctgagccaaaaaagaagagaaaggtaatggacaagaagtacagcatcggcctggccatcggcaccaactctgtgggctgggccgtgatcaccgacgagtacaaggtgcccagcaagaaattcaaggtgctgggcaacaccgaccggcacagcatcaagaagaacctgatcggcgccctgctgttcgacagcggagaaacagccgaggccacccggctgaagagaaccgccagaagaagatacaccagacggaagaaccggatctgctatctgcaagagatcttcagcaacgagatggccaaggtggacgacagcttcttccacagactggaagagtccttcctggtggaagaggataagaagcacgagcggcaccccatcttcggcaacatcgtggacgaggtggcctaccacgagaagtaccccaccatctaccacctgagaaagaaactggtggacagcaccgacaaggccgacctgcggctgatctatctggccctggcccacatgatcaagttccggggccacttcctgatcgagggcgacctgaaccccgacaacagcgacgtggacaagctgttcatccagctggtgcagacctacaaccagctgttcgaggaaaaccccatcaacgccagcggcgtggacgccaaggccatcctgtctgccagactgagcaagagcagacggctggaaaatctgatcgcccagctgcccggcgagaagaagaatggcctgttcggcaacctgattgccctgagcctgggcctgacccccaacttcaagagcaacttcgacctggccgaggatgccaaactgcagctgagcaaggacacctacgacgacgacctggacaacctgctggcccagatcggcgaccagtacgccgacctgtttctggccgccaagaacctgtccgacgccatcctgctgagcgacatcctgagagtgaacaccgagatcaccaaggcccccctgagcgcctctatgatcaagagatacgacgagcaccaccaggacctgaccctgctgaaagctctcgtgcggcagcagctgcctgagaagtacaaagagattttcttcgaccagagcaagaacggctacgccggctacatcgatggcggagccagccaggaagagttctacaagttcatcaagcccatcctggaaaagatggacggcaccgaggaactgctcgtgaagctgaacagagaggacctgctgcggaagcagcggaccttcgacaacggcagcatcccccaccagatccacctgggagagctgcacgccattctgcggcggcaggaagatttttacccattcctgaaggacaaccgggaaaagatcgagaagatcctgaccttccgcatcccctactacgtgggccctctggccaggggaaacagcagattcgcctggatgaccagaaagagcgaggaaaccatcaccccctggaacttcgaggaagtggtggacaagggcgccagcgcccagagcttcatcgagcggatgaccaacttcgataagaacctgcccaacgagaaggtgctgcccaagcacagcctgctgtacgagtacttcaccgtgtacaacgagctgaccaaagtgaaatacgtgaccgagggaatgagaaagcccgccttcctgagcggcgagcagaaaaaagccatcgtggacctgctgttcaagaccaaccggaaagtgaccgtgaagcagctgaaagaggactacttcaagaaaatcgagtgcttcgactccgtggaaatctccggcgtggaagatcggttcaacgcctccctgggcacataccacgatctgctgaaaattatcaaggacaaggacttcctggacaatgaggaaaacgaggacattctggaagatatcgtgctgaccctgacactgtttgaggacagagagatgatcgaggaacggctgaaaacctatgcccacctgttcgacgacaaagtgatgaagcagctgaagcggcggagatacaccggctggggcaggctgagccggaagctgatcaacggcatccgggacaagcagtccggcaagacaatcctggatttcctgaagtccgacggcttcgccaacagaaacttcatgcagctgatccacgacgacagcctgacctttaaagaggacatccagaaagcccaggtgtccggccagggcgatagcctgcacgagcacattgccaatctggccggcagccccgccattaagaagggcatcctgcagacagtgaaggtggtggacgagctcgtgaaagtgatgggccggcacaagcccgagaacatcgtgatcgaaatggccagagagaaccagaccacccagaagggacagaagaacagccgcgagagaatgaagcggatcgaagagggcatcaaagagctgggcagccagatcctgaaagaacaccccgtggaaaacacccagctgcagaacgagaagctgtacctgtactacctgcagaatgggcgggatatgtacgtggaccaggaactggacatcaaccggctgtccgactacgatgtggacgctatcgtgcctcagagctttctgaaggacgactccatcgataacaaagtgctgactcggagcgacaagaaccggggcaagagcgacaacgtgccctccgaagaggtcgtgaagaagatgaagaactactggcgccagctgctgaatgccaagctgattacccagaggaagttcgacaatctgaccaaggccgagagaggcggcctgagcgaactggataaggccggcttcatcaagagacagctggtggaaacccggcagatcacaaagcacgtggcacagatcctggactcccggatgaacactaagtacgacgagaacgacaaactgatccgggaagtgaaagtgatcaccctgaagtccaagctggtgtccgatttccggaaggatttccagttttacaaagtgcgcgagatcaacaactaccaccacgcccacgacgcctacctgaacgccgtcgtgggaaccgccctgatcaaaaagtaccctaagctggaaagcgagttcgtgtacggcgactacaaggtgtacgacgtgcggaagatgatcgccaagagcgagcaggaaatcggcaaggctaccgccaagtacttcttctacagcaacatcatgaactttttcaagaccgagattaccctggccaacggcgagatccggaagcggcctctgatcgagacaaacggcgaaacaggcgagatcgtgtgggataagggccgggactttgccaccgtgcggaaagtgctgtctatgccccaagtgaatatcgtgaaaaagaccgaggtgcagacaggcggcttcagcaaagagtctatcctgcccaagaggaacagcgacaagctgatcgccagaaagaaggactgggaccctaagaagtacggcggcttcgacagccccaccgtggcctattctgtgctggtggtggccaaagtggaaaagggcaagtccaagaaactgaagagtgtgaaagagctgctggggatcaccatcatggaaagaagcagcttcgagaagaatcccatcgactttctggaagccaagggctacaaagaagtgaaaaaggacctgatcatcaagctgcctaagtactccctgttcgagctggaaaacggccggaagagaatgctggcctctgccggcgaactgcagaagggaaacgaactggccctgccctccaaatatgtgaacttcctgtacctggccagccactatgagaagctgaagggctcccccgaggataatgagcagaaacagctgtttgtggaacagcacaaacactacctggacgagatcatcgagcagatcagcgagttctccaagagagtgatcctggccgacgctaatctggacaaggtgctgagcgcctacaacaagcacagagacaagcctatcagagagcaggccgagaatatcatccacctgtttaccctgaccaatctgggagcccctgccgccttcaagtactttgacaccaccatcgaccggaagaggtacaccagcaccaaagaggtgctggacgccaccctgatccaccagagcatcaccggcctgtacgagacacggatcgacctgtctcagctgggaggcgacgcctatccctatgacgtgcccgattatgccagcctgggcagcggctcccccaagaaaaaacgcaaggtggaagatcctaagaaaaagcggaaagtggacggcctcgagtaatgagatcccaagcacgcagcaatgcagctcaaaacgcttagcctagccacacccccacgggaaacagcagtgattaacctttagcaataaacgaaagtttaactaagctatactaaccccagggttggtcaatttcgtgccagccacaccctggtactgcatgcacgcaatgctagctgcccctttcccgtcctgggcaccccgagtctcccccgaccccgggtcccaggtatgctcccacctccacctgccccactcaccacctctgctagttccagacacctccgagacgagg

SEQ ID NO: 295 - RNA, 7234 nt, synthetic construct
  misc_feature 1..7234: note = V43 mRNA
  source 1..7234: mol_type = other RNA
aggactcactatttgttttcgcgcccagttgcaaaaagtgtcgacatttgcttctgacacaactgtgttcactagcaacctcaaacagacaccgccaccatgcctgctgctaagagagtgaaactggatggatccaaccatgaccaggaatttgaccccccaaaggtttacccacctgtgccagctgagaagaggaagcccatccgcgtgctgtctctctttgatgggattgctacagggctcctggtgctgaaggacctgggcatccaagtggaccgctacattgcctccgaggtgtgtgaggactccatcacggtgggcatggtgcggcaccagggaaagatcatgtacgtcggggacgtccgcagcgtcacacagaagcatatccaggagtggggcccattcgacctggtgattggaggcagtccctgcaatgacctctccattgtcaaccctgcccgcaagggactttatgagggtactggccgcctcttctttgagttctaccgcctcctgcatgatgcgcggcccaaggagggagatgatcgccccttcttctggctctttgagaatgtggtggccatgggcgttagtgacaagagggacatctcgcgatttcttgagtctaaccccgtgatgattgacgccaaagaagtgtctgctgcacacagggcccgttacttctggggtaaccttcctggcatgaacaggcctttggcatccactgtgaatgataagctggagctgcaagagtgtctggagcacggcagaatagccaagttcagcaaagtgaggaccattaccaccaggtcaaactctataaagcagggcaaagaccagcatttccccgtcttcatgaacgagaaggaggacatcctgtggtgcactgaaatggaaagggtgtttggcttccccgtccactacacagacgtctccaacatgagccgcttggcgaggcagagactgctgggccgatcgtggagcgtgccggtcatccgccacctcttcgctccgctgaaggaatattttgcttgtgtgtctagcggcaatagtaacgctaacagccgcgggccgagcttcagcagcggcctggtgccgttaagcttgcgcggcagccatatgttcgaaaccgtgcctgtgtggaggagacagccagtccgggtgctgtccctttttgaagacatcaagaaagagctgacgagtttgggctttttggaaagtggttctgacccgggacaactgaagcatgtggttgatgtcacagacacagtgaggaaggatgtggaggagtggggacccttcgatcttgtgtacggcgccacacctcccctgggccacacctgtgaccgtcctcccagctggtacctgttccagttccaccggctcctgcagtacgcacggcccaagccaggcagccccaggcccttcttctggatgttcgtggacaatctggtgctgaacaaggaagacctggacgtcgcatctcgcttcctggagatggagccagtcaccatcccagatgtccacggcggatccttgcagaatgctgtccgcgtgtggagcaacatcccagccataaggagcagcaggcactgggctctggtttcggaagaagaattgtccctgctggcccagaacaagcagagctcgaagctcgcggccaagtggcccaccaagctggtgaagaactgctttctccccctaagagaatatttcaagtatttttcaggagggccgagctctggcagcgagctgattaaggagaacggcctggaaggcagaaacgacatggccctgaagctcgtgggcgggagccatctgatcgcaaacatcaagaccacatatagatccaagaaacccgctaagaacctcaagatgcctggcgtctactatgtggactacagactggaaagaatcaaggaggccaacaacgagacctacgtcgagcagcacgaggtggcagtggccagatactgcgacctccctagcaaactggggcacaagcttaatgcacccccaccaagtggagggtctcctgccgggtccccaacatctactgaagaaggcaccagcgaatccgcaacgcccgagtcaggccctggtacctccacagaaccatctgaaggtagtgcgcctggttccccagctggaagccctacttccaccgaagaaggcacgtcaaccgaaccaagtgaaggatctgcccctgggaccagcactgaaccatctgagatgaacaattcccagggaagagtgaccttcgaggacgtgaccgtgaacttcacccaaggcgagtggcagagactgaaccccgagcagagaaacctgtaccgggacgtgatgctggaaaactacagcaacctggtgtccgtcggccagggcgagacaacaaagcctgacgtgatcctgcggctggaacagggcaaagagccttggctggaagaggaagaggtgctcggatctggcagagccgagaagaatggcgatatcggcggacagatctggaagccaaaggatgtgaaagagagtctcagcggcagcgagacccccggtaccagcgagggcggccctggcacctccacagaaccatctgaaggtagtgcgcctggttccccagctggaagccctacttccaccgaagaaggcacgtcaaccgaaccaagtgaaggatctgcccctgggaccagcactgaaccatctgagccaaaaaagaagagaaaggtaatggacaagaagtacagcatcggcctggccatcggcaccaactctgtgggctgggccgtgatcaccgacgagtacaaggtgcccagcaagaaattcaaggtgctgggcaacaccgaccggcacagcatcaagaagaacctgatcggcgccctgctgttcgacagcggagaaacagccgaggccacccggctgaagagaaccgccagaagaagatacaccagacggaagaaccggatctgctatctgcaagagatcttcagcaacgagatggccaaggtggacgacagcttcttccacagactggaagagtccttcctggtggaagaggataagaagcacgagcggcaccccatcttcggcaacatcgtggacgaggtggcctaccacgagaagtaccccaccatctaccacctgagaaagaaactggtggacagcaccgacaaggccgacctgcggctgatctatctggccctggcccacatgatcaagttccggggccacttcctgatcgagggcgacctgaaccccgacaacagcgacgtggacaagctgttcatccagctggtgcagacctacaaccagctgttcgaggaaaaccccatcaacgccagcggcgtggacgccaaggccatcctgtctgccagactgagcaagagcagacggctggaaaatctgatcgcccagctgcccggcgagaagaagaatggcctgttcggcaacctgattgccctgagcctgggcctgacccccaacttcaagagcaacttcgacctggccgaggatgccaaactgcagctgagcaaggacacctacgacgacgacctggacaacctgctggcccagatcggcgaccagtacgccgacctgtttctggccgccaagaacctgtccgacgccatcctgctgagcgacatcctgagagtgaacaccgagatcaccaaggcccccctgagcgcctctatgatcaagagatacgacgagcaccaccaggacctgaccctgctgaaagctctcgtgcggcagcagctgcctgagaagtacaaagagattttcttcgaccagagcaagaacggctacgccggctacatcgatggcggagccagccaggaagagttctacaagttcatcaagcccatcctggaaaagatggacggcaccgaggaactgctcgtgaagctgaacagagaggacctgctgcggaagcagcggaccttcgacaacggcagcatcccccaccagatccacctgggagagctgcacgccattctgcggcggcaggaagatttttacccattcctgaaggacaaccgggaaaagatcgagaagatcctgaccttccgcatcccctactacgtgggccctctggccaggggaaacagcagattcgcctggatgaccagaaagagcgaggaaaccatcaccccctggaacttcgaggaagtggtggacaagggcgccagcgcccagagcttcatcgagcggatgaccaacttcgataagaacctgcccaacgagaaggtgctgcccaagcacagcctgctgtacgagtacttcaccgtgtacaacgagctgaccaaagtgaaatacgtgaccgagggaatgagaaagcccgccttcctgagcggcgagcagaaaaaagccatcgtggacctgctgttcaagaccaaccggaaagtgaccgtgaagcagctgaaagaggactacttcaagaaaatcgagtgcttcgactccgtggaaatctccggcgtggaagatcggttcaacgcctccctgggcacataccacgatctgctgaaaattatcaaggacaaggacttcctggacaatgaggaaaacgaggacattctggaagatatcgtgctgaccctgacactgtttgaggacagagagatgatcgaggaacggctgaaaacctatgcccacctgttcgacgacaaagtgatgaagcagctgaagcggcggagatacaccggctggggcaggctgagccggaagctgatcaacggcatccgggacaagcagtccggcaagacaatcctggatttcctgaagtccgacggcttcgccaacagaaacttcatgcagctgatccacgacgacagcctgacctttaaagaggacatccagaaagcccaggtgtccggccagggcgatagcctgcacgagcacattgccaatctggccggcagccccgccattaagaagggcatcctgcagacagtgaaggtggtggacgagctcgtgaaagtgatgggccggcacaagcccgagaacatcgtgatcgaaatggccagagagaaccagaccacccagaagggacagaagaacagccgcgagagaatgaagcggatcgaagagggcatcaaagagctgggcagccagatcctgaaagaacaccccgtggaaaacacccagctgcagaacgagaagctgtacctgtactacctgcagaatgggcgggatatgtacgtggaccaggaactggacatcaaccggctgtccgactacgatgtggacgctatcgtgcctcagagctttctgaaggacgactccatcgataacaaagtgctgactcggagcgacaagaaccggggcaagagcgacaacgtgccctccgaagaggtcgtgaagaagatgaagaactactggcgccagctgctgaatgccaagctgattacccagaggaagttcgacaatctgaccaaggccgagagaggcggcctgagcgaactggataaggccggcttcatcaagagacagctggtggaaacccggcagatcacaaagcacgtggcacagatcctggactcccggatgaacactaagtacgacgagaacgacaaactgatccgggaagtgaaagtgatcaccctgaagtccaagctggtgtccgatttccggaaggatttccagttttacaaagtgcgcgagatcaacaactaccaccacgcccacgacgcctacctgaacgccgtcgtgggaaccgccctgatcaaaaagtaccctaagctggaaagcgagttcgtgtacggcgactacaaggtgtacgacgtgcggaagatgatcgccaagagcgagcaggaaatcggcaaggctaccgccaagtacttcttctacagcaacatcatgaactttttcaagaccgagattaccctggccaacggcgagatccggaagcggcctctgatcgagacaaacggcgaaacaggcgagatcgtgtgggataagggccgggactttgccaccgtgcggaaagtgctgtctatgccccaagtgaatatcgtgaaaaagaccgaggtgcagacaggcggcttcagcaaagagtctatcctgcccaagaggaacagcgacaagctgatcgccagaaagaaggactgggaccctaagaagtacggcggcttcgacagccccaccgtggcctattctgtgctggtggtggccaaagtggaaaagggcaagtccaagaaactgaagagtgtgaaagagctgctggggatcaccatcatggaaagaagcagcttcgagaagaatcccatcgactttctggaagccaagggctacaaagaagtgaaaaaggacctgatcatcaagctgcctaagtactccctgttcgagctggaaaacggccggaagagaatgctggcctctgccggcgaactgcagaagggaaacgaactggccctgccctccaaatatgtgaacttcctgtacctggccagccactatgagaagctgaagggctcccccgaggataatgagcagaaacagctgtttgtggaacagcacaaacactacctggacgagatcatcgagcagatcagcgagttctccaagagagtgatcctggccgacgctaatctggacaaggtgctgagcgcctacaacaagcacagagacaagcctatcagagagcaggccgagaatatcatccacctgtttaccctgaccaatctgggagcccctgccgccttcaagtactttgacaccaccatcgaccggaagaggtacaccagcaccaaagaggtgctggacgccaccctgatccaccagagcatcaccggcctgtacgagacacggatcgacctgtctcagctgggaggcgacgcctatccctatgacgtgcccgattatgccagcctgggcagcggctcccccaagaaaaaacgcaaggtggaagatcctaagaaaaagcggaaagtggacggcctcgagtaatgagatcccaagcacgcagcaatgcagctcaaaacgcttagcctagccacacccccacgggaaacagcagtgattaacctttagcaataaacgaaagtttaactaagctatactaaccccagggttggtcaatttcgtgccagccacaccctggtactgcatgcacgcaatgctagctgcccctttcccgtcctgggcaccccgagtctcccccgaccccgggtcccaggtatgctcccacctccacctgccccactcaccacctctgctagttccagacacctccgagacgagg

SEQ ID NO: 296 - RNA, 7114 nt, synthetic construct
  misc_feature 1..7114: note = V44 mRNA
  source 1..7114: mol_type = other RNA
aggactcactatttgttttcgcgcccagttgcaaaaagtgtcgacatttgcttctgacacaactgtgttcactagcaacctcaaacagacaccgccaccatgcctgctgctaagagagtgaaactggatggatccaaccatgaccaggaatttgaccccccaaaggtttacccacctgtgccagctgagaagaggaagcccatccgcgtgctgtctctctttgatgggattgctacagggctcctggtgctgaaggacctgggcatccaagtggaccgctacattgcctccgaggtgtgtgaggactccatcacggtgggcatggtgcggcaccagggaaagatcatgtacgtcggggacgtccgcagcgtcacacagaagcatatccaggagtggggcccattcgacctggtgattggaggcagtccctgcaatgacctctccattgtcaaccctgcccgcaagggactttatgagggtactggccgcctcttctttgagttctaccgcctcctgcatgatgcgcggcccaaggagggagatgatcgccccttcttctggctctttgagaatgtggtggccatgggcgttagtgacaagagggacatctcgcgatttcttgagtctaaccccgtgatgattgacgccaaagaagtgtctgctgcacacagggcccgttacttctggggtaaccttcctggcatgaacaggcctttggcatccactgtgaatgataagctggagctgcaagagtgtctggagcacggcagaatagccaagttcagcaaagtgaggaccattaccaccaggtcaaactctataaagcagggcaaagaccagcatttccccgtcttcatgaacgagaaggaggacatcctgtggtgcactgaaatggaaagggtgtttggcttccccgtccactacacagacgtctccaacatgagccgcttggcgaggcagagactgctgggccgatcgtggagcgtgccggtcatccgccacctcttcgctccgctgaaggaatattttgcttgtgtgtctagcggcaatagtaacgctaacagccgcgggccgagcttcagcagcggcctggtgccgttaagcttgcgcggcagccatatgttcgaaaccgtgcctgtgtggaggagacagccagtccgggtgctgtccctttttgaagacatcaagaaagagctgacgagtttgggctttttggaaagtggttctgacccgggacaactgaagcatgtggttgatgtcacagacacagtgaggaaggatgtggaggagtggggacccttcgatcttgtgtacggcgccacacctcccctgggccacacctgtgaccgtcctcccagctggtacctgttccagttccaccggctcctgcagtacgcacggcccaagccaggcagccccaggcccttcttctggatgttcgtggacaatctggtgctgaacaaggaagacctggacgtcgcatctcgcttcctggagatggagccagtcaccatcccagatgtccacggcggatccttgcagaatgctgtccgcgtgtggagcaacatcccagccataaggagcagcaggcactgggctctggtttcggaagaagaattgtccctgctggcccagaacaagcagagctcgaagctcgcggccaagtggcccaccaagctggtgaagaactgctttctccccctaagagaatatttcaagtatttttcaggagggccgagctctggcagcgagctgattaaggagaactactatgtggactacagactggaaagaatcaaggaggccaacaacgagacctacgtcgagcagcacgaggtggcagtggccagatactgcgacctccctagcaaactggggcacaagcttaatgcacccccaccaagtggagggtctcctgccgggtccccaacatctactgaagaaggcaccagcgaatccgcaacgcccgagtcaggccctggtacctccacagaaccatctgaaggtagtgcgcctggttccccagctggaagccctacttccaccgaagaaggcacgtcaaccgaaccaagtgaaggatctgcccctgggaccagcactgaaccatctgagatgaacaattcccagggaagagtgaccttcgaggacgtgaccgtgaacttcacccaaggcgagtggcagagactgaaccccgagcagagaaacctgtaccgggacgtgatgctggaaaactacagcaacctggtgtccgtcggccagggcgagacaacaaagcctgacgtgatcctgcggctggaacagggcaaagagccttggctggaagaggaagaggtgctcggatctggcagagccgagaagaatggcgatatcggcggacagatctggaagccaaaggatgtgaaagagagtctcagcggcagcgagacccccggtaccagcgagggcggccctggcacctccacagaaccatctgaaggtagtgcgcctggttccccagctggaagccctacttccaccgaagaaggcacgtcaaccgaaccaagtgaaggatctgcccctgggaccagcactgaaccatctgagccaaaaaagaagagaaaggtaatggacaagaagtacagcatcggcctggccatcggcaccaactctgtgggctgggccgtgatcaccgacgagtacaaggtgcccagcaagaaattcaaggtgctgggcaacaccgaccggcacagcatcaagaagaacctgatcggcgccctgctgttcgacagcggagaaacagccgaggccacccggctgaagagaaccgccagaagaagatacaccagacggaagaaccggatctgctatctgcaagagatcttcagcaacgagatggccaaggtggacgacagcttcttccacagactggaagagtccttcctggtggaagaggataagaagcacgagcggcaccccatcttcggcaacatcgtggacgaggtggcctaccacgagaagtaccccaccatctaccacctgagaaagaaactggtggacagcaccgacaaggccgacctgcggctgatctatctggccctggcccacatgatcaagttccggggccacttcctgatcgagggcgacctgaaccccgacaacagcgacgtggacaagctgttcatccagctggtgcagacctacaaccagctgttcgaggaaaaccccatcaacgccagcggcgtggacgccaaggccatcctgtctgccagactgagcaagagcagacggctggaaaatctgatcgcccagctgcccggcgagaagaagaatggcctgttcggcaacctgattgccctgagcctgggcctgacccccaacttcaagagcaacttcgacctggccgaggatgccaaactgcagctgagcaaggacacctacgacgacgacctggacaacctgctggcccagatcggcgaccagtacgccgacctgtttctggccgccaagaacctgtccgacgccatcctgctgagcgacatcctgagagtgaacaccgagatcaccaaggcccccctgagcgcctctatgatcaagagatacgacgagcaccaccaggacctgaccctgctgaaagctctcgtgcggcagcagctgcctgagaagtacaaagagattttcttcgaccagagcaagaacggctacgccggctacatcgatggcggagccagccaggaagagttctacaagttcatcaagcccatcctggaaaagatggacggcaccgaggaactgctcgtgaagctgaacagagaggacctgctgcggaagcagcggaccttcgacaacggcagcatcccccaccagatccacctgggagagctgcacgccattctgcggcggcaggaagatttttacccattcctgaaggacaaccgggaaaagatcgagaagatcctgaccttccgcatcccctactacgtgggccctctggccaggggaaacagcagattcgcctggatgaccagaaagagcgaggaaaccatcaccccctggaacttcgaggaagtggtggacaagggcgccagcgcccagagcttcatcgagcggatgaccaacttcgataagaacctgcccaacgagaaggtgctgcccaagcacagcctgctgtacgagtacttcaccgtgtacaacgagctgaccaaagtgaaatacgtgaccgagggaatgagaaagcccgccttcctgagcggcgagcagaaaaaagccatcgtggacctgctgttcaagaccaaccggaaagtgaccgtgaagcagctgaaagaggactacttcaagaaaatcgagtgcttcgactccgtggaaatctccggcgtggaagatcggttcaacgcctccctgggcacataccacgatctgctgaaaattatcaaggacaaggacttcctggacaatgaggaaaacgaggacattctggaagatatcgtgctgaccctgacactgtttgaggacagagagatgatcgaggaacggctgaaaacctatgcccacctgttcgacgacaaagtgatgaagcagctgaagcggcggagatacaccggctggggcaggctgagccggaagctgatcaacggcatccgggacaagcagtccggcaagacaatcctggatttcctgaagtccgacggcttcgccaacagaaacttcatgcagctgatccacgacgacagcctgacctttaaagaggacatccagaaagcccaggtgtccggccagggcgatagcctgcacgagcacattgccaatctggccggcagccccgccattaagaagggcatcctgcagacagtgaaggtggtggacgagctcgtgaaagtgatgggccggcacaagcccgagaacatcgtgatcgaaatggccagagagaaccagaccacccagaagggacagaagaacagccgcgagagaatgaagcggatcgaagagggcatcaaagagctgggcagccagatcctgaaagaacaccccgtggaaaacacccagctgcagaacgagaagctgtacctgtactacctgcagaatgggcgggatatgtacgtggaccaggaactggacatcaaccggctgtccgactacgatgtggacgctatcgtgcctcagagctttctgaaggacgactccatcgataacaaagtgctgactcggagcgacaagaaccggggcaagagcgacaacgtgccctccgaagaggtcgtgaagaagatgaagaactactggcgccagctgctgaatgccaagctgattacccagaggaagttcgacaatctgaccaaggccgagagaggcggcctgagcgaactggataaggccggcttcatcaagagacagctggtggaaacccggcagatcacaaagcacgtggcacagatcctggactcccggatgaacactaagtacgacgagaacgacaaactgatccgggaagtgaaagtgatcaccctgaagtccaagctggtgtccgatttccggaaggatttccagttttacaaagtgcgcgagatcaacaactaccaccacgcccacgacgcctacctgaacgccgtcgtgggaaccgccctgatcaaaaagtaccctaagctggaaagcgagttcgtgtacggcgactacaaggtgtacgacgtgcggaagatgatcgccaagagcgagcaggaaatcggcaaggctaccgccaagtacttcttctacagcaacatcatgaactttttcaagaccgagattaccctggccaacggcgagatccggaagcggcctctgatcgagacaaacggcgaaacaggcgagatcgtgtgggataagggccgggactttgccaccgtgcggaaagtgctgtctatgccccaagtgaatatcgtgaaaaagaccgaggtgcagacaggcggcttcagcaaagagtctatcctgcccaagaggaacagcgacaagctgatcgccagaaagaaggactgggaccctaagaagtacggcggcttcgacagccccaccgtggcctattctgtgctggtggtggccaaagtggaaaagggcaagtccaagaaactgaagagtgtgaaagagctgctggggatcaccatcatggaaagaagcagcttcgagaagaatcccatcgactttctggaagccaagggctacaaagaagtgaaaaaggacctgatcatcaagctgcctaagtactccctgttcgagctggaaaacggccggaagagaatgctggcctctgccggcgaactgcagaagggaaacgaactggccctgccctccaaatatgtgaacttcctgtacctggccagccactatgagaagctgaagggctcccccgaggataatgagcagaaacagctgtttgtggaacagcacaaacactacctggacgagatcatcgagcagatcagcgagttctccaagagagtgatcctggccgacgctaatctggacaaggtgctgagcgcctacaacaagcacagagacaagcctatcagagagcaggccgagaatatcatccacctgtttaccctgaccaatctgggagcccctgccgccttcaagtactttgacaccaccatcgaccggaagaggtacaccagcaccaaagaggtgctggacgccaccctgatccaccagagcatcaccggcctgtacgagacacggatcgacctgtctcagctgggaggcgacgcctatccctatgacgtgcccgattatgccagcctgggcagcggctcccccaagaaaaaacgcaaggtggaagatcctaagaaaaagcggaaagtggacggcctcgagtaatgagatcccaagcacgcagcaatgcagctcaaaacgcttagcctagccacacccccacgggaaacagcagtgattaacctttagcaataaacgaaagtttaactaagctatactaaccccagggttggtcaatttcgtgccagccacaccctggtactgcatgcacgcaatgctagctgcccctttcccgtcctgggcaccccgagtctcccccgaccccgggtcccaggtatgctcccacctccacctgccccactcaccacctctgctagttccagacacctccgagacgagg

SEQ ID NO: 297 - RNA, 7051 nt, synthetic construct
  misc_feature 1..7051: note = V45 mRNA
  source 1..7051: mol_type = other RNA
aggactcactatttgttttcgcgcccagttgcaaaaagtgtcgacatttgcttctgacacaactgtgttcactagcaacctcaaacagacaccgccaccatgcctgctgctaagagagtgaaactggatggatccaaccatgaccaggaatttgaccccccaaaggtttacccacctgtgccagctgagaagaggaagcccatccgcgtgctgtctctctttgatgggattgctacagggctcctggtgctgaaggacctgggcatccaagtggaccgctacattgcctccgaggtgtgtgaggactccatcacggtgggcatggtgcggcaccagggaaagatcatgtacgtcggggacgtccgcagcgtcacacagaagcatatccaggagtggggcccattcgacctggtgattggaggcagtccctgcaatgacctctccattgtcaaccctgcccgcaagggactttatgagggtactggccgcctcttctttgagttctaccgcctcctgcatgatgcgcggcccaaggagggagatgatcgccccttcttctggctctttgagaatgtggtggccatgggcgttagtgacaagagggacatctcgcgatttcttgagtctaaccccgtgatgattgacgccaaagaagtgtctgctgcacacagggcccgttacttctggggtaaccttcctggcatgaacaggcctttggcatccactgtgaatgataagctggagctgcaagagtgtctggagcacggcagaatagccaagttcagcaaagtgaggaccattaccaccaggtcaaactctataaagcagggcaaagaccagcatttccccgtcttcatgaacgagaaggaggacatcctgtggtgcactgaaatggaaagggtgtttggcttccccgtccactacacagacgtctccaacatgagccgcttggcgaggcagagactgctgggccgatcgtggagcgtgccggtcatccgccacctcttcgctccgctgaaggaatattttgcttgtgtgtctagcggcaatagtaacgctaacagccgcgggccgagcttcagcagcggcctggtgccgttaagcttgcgcggcagccatatgttcgaaaccgtgcctgtgtggaggagacagccagtccgggtgctgtccctttttgaagacatcaagaaagagctgacgagtttgggctttttggaaagtggttctgacccgggacaactgaagcatgtggttgatgtcacagacacagtgaggaaggatgtggaggagtggggacccttcgatcttgtgtacggcgccacacctcccctgggccacacctgtgaccgtcctcccagctggtacctgttccagttccaccggctcctgcagtacgcacggcccaagccaggcagccccaggcccttcttctggatgttcgtggacaatctggtgctgaacaaggaagacctggacgtcgcatctcgcttcctggagatggagccagtcaccatcccagatgtccacggcggatccttgcagaatgctgtccgcgtgtggagcaacatcccagccataaggagcagcaggcactgggctctggtttcggaagaagaattgtccctgctggcccagaacaagcagagctcgaagctcgcggccaagtggcccaccaagctggtgaagaactgctttctccccctaagagaatatttcaagtatttttcaggagggccgagctctggcgcacccccaccaagtggagggtctcctgccgggtccccaacatctactgaagaaggcaccagcgaatccgcaacgcccgagtcaggccctggtacctccacagaaccatctgaaggtagtgcgcctggttccccagctggaagccctacttccaccgaagaaggcacgtcaaccgaaccaagtgaaggatctgcccctgggaccagcactgaaccatctgagatgaacaattcccagggaagagtgaccttcgaggacgtgaccgtgaacttcacccaaggcgagtggcagagactgaaccccgagcagagaaacctgtaccgggacgtgatgctggaaaactacagcaacctggtgtccgtcggccagggcgagacaacaaagcctgacgtgatcctgcggctggaacagggcaaagagccttggctggaagaggaagaggtgctcggatctggcagagccgagaagaatggcgatatcggcggacagatctggaagccaaaggatgtgaaagagagtctcagcggcagcggcagcggatcaggcggatctggcagcggtggatctggttctggatccggcggctccggtagtggtggaagtggctctggggagacccccggtaccagcgagggcggccctggcacctccacagaaccatctgaaggtagtgcgcctggttccccagctggaagccctacttccaccgaagaaggcacgtcaaccgaaccaagtgaaggatctgcccctgggaccagcactgaaccatctgagccaaaaaagaagagaaaggtaatggacaagaagtacagcatcggcctggccatcggcaccaactctgtgggctgggccgtgatcaccgacgagtacaaggtgcccagcaagaaattcaaggtgctgggcaacaccgaccggcacagcatcaagaagaacctgatcggcgccctgctgttcgacagcggagaaacagccgaggccacccggctgaagagaaccgccagaagaagatacaccagacggaagaaccggatctgctatctgcaagagatcttcagcaacgagatggccaaggtggacgacagcttcttccacagactggaagagtccttcctggtggaagaggataagaagcacgagcggcaccccatcttcggcaacatcgtggacgaggtggcctaccacgagaagtaccccaccatctaccacctgagaaagaaactggtggacagcaccgacaaggccgacctgcggctgatctatctggccctggcccacatgatcaagttccggggccacttcctgatcgagggcgacctgaaccccgacaacagcgacgtggacaagctgttcatccagctggtgcagacctacaaccagctgttcgaggaaaaccccatcaacgccagcggcgtggacgccaaggccatcctgtctgccagactgagcaagagcagacggctggaaaatctgatcgcccagctgcccggcgagaagaagaatggcctgttcggcaacctgattgccctgagcctgggcctgacccccaacttcaagagcaacttcgacctggccgaggatgccaaactgcagctgagcaaggacacctacgacgacgacctggacaacctgctggcccagatcggcgaccagtacgccgacctgtttctggccgccaagaacctgtccgacgccatcctgctgagcgacatcctgagagtgaacaccgagatcaccaaggcccccctgagcgcctctatgatcaagagatacgacgagcaccaccaggacctgaccctgctgaaagctctcgtgcggcagcagctgcctgagaagtacaaagagattttcttcgaccagagcaagaacggctacgccggctacatcgatggcggagccagccaggaagagttctacaagttcatcaagcccatcctggaaaagatggacggcaccgaggaactgctcgtgaagctgaacagagaggacctgctgcggaagcagcggaccttcgacaacggcagcatcccccaccagatccacctgggagagctgcacgccattctgcggcggcaggaagatttttacccattcctgaaggacaaccgggaaaagatcgagaagatcctgaccttccgcatcccctactacgtgggccctctggccaggggaaacagcagattcgcctggatgaccagaaagagcgaggaaaccatcaccccctggaacttcgaggaagtggtggacaagggcgccagcgcccagagcttcatcgagcggatgaccaacttcgataagaacctgcccaacgagaaggtgctgcccaagcacagcctgctgtacgagtacttcaccgtgtacaacgagctgaccaaagtgaaatacgtgaccgagggaatgagaaagcccgccttcctgagcggcgagcagaaaaaagccatcgtggacctgctgttcaagaccaaccggaaagtgaccgtgaagcagctgaaagaggactacttcaagaaaatcgagtgcttcgactccgtggaaatctccggcgtggaagatcggttcaacgcctccctgggcacataccacgatctgctgaaaattatcaaggacaaggacttcctggacaatgaggaaaacgaggacattctggaagatatcgtgctgaccctgacactgtttgaggacagagagatgatcgaggaacggctgaaaacctatgcccacctgttcgacgacaaagtgatgaagcagctgaagcggcggagatacaccggctggggcaggctgagccggaagctgatcaacggcatccgggacaagcagtccggcaagacaatcctggatttcctgaagtccgacggcttcgccaacagaaacttcatgcagctgatccacgacgacagcctgacctttaaagaggacatccagaaagcccaggtgtccggccagggcgatagcctgcacgagcacattgccaatctggccggcagccccgccattaagaagggcatcctgcagacagtgaaggtggtggacgagctcgtgaaagtgatgggccggcacaagcccgagaacatcgtgatcgaaatggccagagagaaccagaccacccagaagggacagaagaacagccgcgagagaatgaagcggatcgaagagggcatcaaagagctgggcagccagatcctgaaagaacaccccgtggaaaacacccagctgcagaacgagaagctgtacctgtactacctgcagaatgggcgggatatgtacgtggaccaggaactggacatcaaccggctgtccgactacgatgtggacgctatcgtgcctcagagctttctgaaggacgactccatcgataacaaagtgctgactcggagcgacaagaaccggggcaagagcgacaacgtgccctccgaagaggtcgtgaagaagatgaagaactactggcgccagctgctgaatgccaagctgattacccagaggaagttcgacaatctgaccaaggccgagagaggcggcctgagcgaactggataaggccggcttcatcaagagacagctggtggaaacccggcagatcacaaagcacgtggcacagatcctggactcccggatgaacactaagtacgacgagaacgacaaactgatccgggaagtgaaagtgatcaccctgaagtccaagctggtgtccgatttccggaaggatttccagttttacaaagtgcgcgagatcaacaactaccaccacgcccacgacgcctacctgaacgccgtcgtgggaaccgccctgatcaaaaagtaccctaagctggaaagcgagttcgtgtacggcgactacaaggtgtacgacgtgcggaagatgatcgccaagagcgagcaggaaatcggcaaggctaccgccaagtacttcttctacagcaacatcatgaactttttcaagaccgagattaccctggccaacggcgagatccggaagcggcctctgatcgagacaaacggcgaaacaggcgagatcgtgtgggataagggccgggactttgccaccgtgcggaaagtgctgtctatgccccaagtgaatatcgtgaaaaagaccgaggtgcagacaggcggcttcagcaaagagtctatcctgcccaagaggaacagcgacaagctgatcgccagaaagaaggactgggaccctaagaagtacggcggcttcgacagccccaccgtggcctattctgtgctggtggtggccaaagtggaaaagggcaagtccaagaaactgaagagtgtgaaagagctgctggggatcaccatcatggaaagaagcagcttcgagaagaatcccatcgactttctggaagccaagggctacaaagaagtgaaaaaggacctgatcatcaagctgcctaagtactccctgttcgagctggaaaacggccggaagagaatgctggcctctgccggcgaactgcagaagggaaacgaactggccctgccctccaaatatgtgaacttcctgtacctggccagccactatgagaagctgaagggctcccccgaggataatgagcagaaacagctgtttgtggaacagcacaaacactacctggacgagatcatcgagcagatcagcgagttctccaagagagtgatcctggccgacgctaatctggacaaggtgctgagcgcctacaacaagcacagagacaagcctatcagagagcaggccgagaatatcatccacctgtttaccctgaccaatctgggagcccctgccgccttcaagtactttgacaccaccatcgaccggaagaggtacaccagcaccaaagaggtgctggacgccaccctgatccaccagagcatcaccggcctgtacgagacacggatcgacctgtctcagctgggaggcgacgcctatccctatgacgtgcccgattatgccagcctgggcagcggctcccccaagaaaaaacgcaaggtggaagatcctaagaaaaagcggaaagtggacggcctcgagtaatgagatcccaagcacgcagcaatgcagctcaaaacgcttagcctagccacacccccacgggaaacagcagtgattaacctttagcaataaacgaaagtttaactaagctatactaaccccagggttggtcaatttcgtgccagccacaccctggtactgcatgcacgcaatgctagctgcccctttcccgtcctgggcaccccgagtctcccccgaccccgggtcccaggtatgctcccacctccacctgccccactcaccacctctgctagttccagacacctccgagacgagg

SEQ ID NO: 298 - RNA, 7120 nt, synthetic construct
  misc_feature 1..7120: note = V46 mRNA
  source 1..7120: mol_type = other RNA
aggactcactatttgttttcgcgcccagttgcaaaaagtgtcgacatttgcttctgacacaactgtgttcactagcaacctcaaacagacaccgccaccatggtgcctgccgccaagagagtgaagctggacggcagcaaccacgaccaagagttcgaccctcctaaggtgtaccctcctgtgccagccgagaagcggaagcctatcagagtgctgagcctgttcgacggaatcgccacaggactgctggtgctgaaggatctgggaatccaggtggaccggtatatcgccagcgaagtgtgcgaggacagcatcacagttggcatggttcgacaccagggcaagattatgtacgtgggcgacgtgcggagcgtgacccagaaacacattcaagagtggggccccttcgacctggttatcggcggcagcccttgcaacgatctgagcatcgtgaaccccgccagaaagggcctgtatgaaggcaccggcagactgttcttcgagttctacagactgctgcacgacgccagacctaaagagggcgacgacagaccattcttctggctgttcgagaacgtggtggctatgggcgtgtccgacaagcgggacatcagccggtttctggaaagcaaccccgtgatgatcgacgccaaagaggtgtccgctgctcaccgggccagatacttttggggcaatctgcccggcatgaacagacctctggccagcaccgtgaacgacaagctggaactgcaagagtgcctggaacacggccggatcgccaagtttagcaaagtgcggaccatcaccaccaggtccaacagcatcaagcagggcaaagaccagcacttccccgtgttcatgaatgagaaagaggacatcctgtggtgcaccgagatggaaagagtgttcggcttccctgtgcactacaccgacgtgtccaacatgagcagactggccagacagaggctgctgggcagatcttggagcgtgccagtgatcagacacctgttcgcccctctgaaagaatacttcgcctgcgtgtccagcggcaacagcaacgccaatagcagaggccctagcttcagctctggactggtgcctttgagcctgagaggcagccacatgttcgagacagtgcctgtgtggcggagacagcccgttagagtgctgtccctgtttgaggacatcaagaaagagctgaccagcctgggcttcctggaaagcggatctgatcctggccagctgaagcacgtggtggacgtgaccgataccgtgcggaaggatgtggaagaatggggcccttttgatctggtgtacggcgccacacctcctctgggccacacatgtgatagacctccaagctggtatctgttccagttccaccggctgctgcagtacgctagacccaagcctggaagccccaggcctttcttttggatgttcgtggacaacctggtcctgaacaaagaggacctggacgtcgccagccggttcctcgaaatggaacctgtgacaatccccgacgtgcacggcggatctctgcagaatgctgtcagagtgtggtctaacatccccgccatcagaagcagcagacactgggcccttgtgtccgaggaagaactgtctctgctggcccagaacaagcagagcagcaagctggccgccaagtggcctacaaagctggtcaagaactgcttcctgcctctgcgcgagtacttcaagtatttcagcggcggacctagctctggcgcccctccacctagcggaggatctccagcaggatctcctaccagcaccgaggaaggcacaagcgagtctgccacacctgagtctggccctggcacatctacagagcctagcgagggatctgcccctggatctcctgctggcagccctacatctaccgaagagggaaccagcacagagccttccgaaggttctgctcctggcacaagcaccgagccaagcgagcctaagaagaagagaaaagtcggcagcggcagcgagacaccaggcacatctgaaagcgctacccctgagagcatgaacaacagccagggcagagtgaccttcgaggatgtgaccgtgaacttcacccaaggcgagtggcagagactgaaccccgagcagagaaacctgtaccgggacgtgatgctggaaaactacagcaacctggtgtccgtcggccagggcgagacaacaaagcctgacgtgatcctgcggctggaacagggaaaagagccttggctggaagaggaagaggtgctcggatctggacgggccgagaagaacggcgatattggcggacagatctggaagcctaaggacgtgaaagagagcctgagcggctctggaagtggctctggtggatctggtagcggaggttctggttccggttctggtggttcaggatctggcggttctggaagcggcgaaacacctggaacaagcgaaggcggaccaggcacctctaccgaaccatctgagggaagcgctccaggttctcctgccggctctccaacaagcacagaagagggcacctccactgagccctctgaaggcagtgctcctggaacttccaccgaaccttccgagccaaagaagaaacgcaaggtgggctccgacaagaagtacagcatcggcctggccatcggcaccaactctgtgggctgggccgtgatcaccgacgagtacaaggtgcccagcaagaaattcaaggtgctgggcaacaccgaccggcacagcatcaagaagaacctgatcggcgccctgctgttcgacagcggagaaacagccgaggccacccggctgaagagaaccgccagaagaagatacaccagacggaagaaccggatctgctatctgcaagagatcttcagcaacgagatggccaaggtggacgacagcttcttccacagactggaagagtccttcctggtggaagaggataagaagcacgagcggcaccccatcttcggcaacatcgtggacgaggtggcctaccacgagaagtaccccaccatctaccacctgagaaagaaactggtggacagcaccgacaaggccgacctgcggctgatctatctggccctggcccacatgatcaagttccggggccacttcctgatcgagggcgacctgaaccccgacaacagcgacgtggacaagctgttcatccagctggtgcagacctacaaccagctgttcgaggaaaaccccatcaacgccagcggcgtggacgccaaggccatcctgtctgccagactgagcaagagcagacggctggaaaatctgatcgcccagctgcccggcgagaagaagaatggcctgttcggcaacctgattgccctgagcctgggcctgacccccaacttcaagagcaacttcgacctggccgaggatgccaaactgcagctgagcaaggacacctacgacgacgacctggacaacctgctggcccagatcggcgaccagtacgccgacctgtttctggccgccaagaacctgtccgacgccatcctgctgagcgacatcctgagagtgaacaccgagatcaccaaggcccccctgagcgcctctatgatcaagagatacgacgagcaccaccaggacctgaccctgctgaaagctctcgtgcggcagcagctgcctgagaagtacaaagagattttcttcgaccagagcaagaacggctacgccggctacatcgatggcggagccagccaggaagagttctacaagttcatcaagcccatcctggaaaagatggacggcaccgaggaactgctcgtgaagctgaacagagaggacctgctgcggaagcagcggaccttcgacaacggcagcatcccccaccagatccacctgggagagctgcacgccattctgcggcggcaggaagatttttacccattcctgaaggacaaccgggaaaagatcgagaagatcctgaccttccgcatcccctactacgtgggccctctggccaggggaaacagcagattcgcctggatgaccagaaagagcgaggaaaccatcaccccctggaacttcgaggaagtggtggacaagggcgccagcgcccagagcttcatcgagcggatgaccaacttcgataagaacctgcccaacgagaaggtgctgcccaagcacagcctgctgtacgagtacttcaccgtgtacaacgagctgaccaaagtgaaatacgtgaccgagggaatgagaaagcccgccttcctgagcggcgagcagaaaaaagccatcgtggacctgctgttcaagaccaaccggaaagtgaccgtgaagcagctgaaagaggactacttcaagaaaatcgagtgcttcgactccgtggaaatctccggcgtggaagatcggttcaacgcctccctgggcacataccacgatctgctgaaaattatcaaggacaaggacttcctggacaatgaggaaaacgaggacattctggaagatatcgtgctgaccctgacactgtttgaggacagagagatgatcgaggaacggctgaaaacctatgcccacctgttcgacgacaaagtgatgaagcagctgaagcggcggagatacaccggctggggcaggctgagccggaagctgatcaacggcatccgggacaagcagtccggcaagacaatcctggatttcctgaagtccgacggcttcgccaacagaaacttcatgcagctgatccacgacgacagcctgacctttaaagaggacatccagaaagcccaggtgtccggccagggcgatagcctgcacgagcacattgccaatctggccggcagccccgccattaagaagggcatcctgcagacagtgaaggtggtggacgagctcgtgaaagtgatgggccggcacaagcccgagaacatcgtgatcgaaatggccagagagaaccagaccacccagaagggacagaagaacagccgcgagagaatgaagcggatcgaagagggcatcaaagagctgggcagccagatcctgaaagaacaccccgtggaaaacacccagctgcagaacgagaagctgtacctgtactacctgcagaatgggcgggatatgtacgtggaccaggaactggacatcaaccggctgtccgactacgatgtggacgctatcgtgcctcagagctttctgaaggacgactccatcgataacaaagtgctgactcggagcgacaagaaccggggcaagagcgacaacgtgccctccgaagaggtcgtgaagaagatgaagaactactggcgccagctgctgaatgccaagctgattacccagaggaagttcgacaatctgaccaaggccgagagaggcggcctgagcgaactggataaggccggcttcatcaagagacagctggtggaaacccggcagatcacaaagcacgtggcacagatcctggactcccggatgaacactaagtacgacgagaacgacaaactgatccgggaagtgaaagtgatcaccctgaagtccaagctggtgtccgatttccggaaggatttccagttttacaaagtgcgcgagatcaacaactaccaccacgcccacgacgcctacctgaacgccgtcgtgggaaccgccctgatcaaaaagtaccctaagctggaaagcgagttcgtgtacggcgactacaaggtgtacgacgtgcggaagatgatcgccaagagcgagcaggaaatcggcaaggctaccgccaagtacttcttctacagcaacatcatgaactttttcaagaccgagattaccctggccaacggcgagatccggaagcggcctctgatcgagacaaacggcgaaacaggcgagatcgtgtgggataagggccgggactttgccaccgtgcggaaagtgctgtctatgccccaagtgaatatcgtgaaaaagaccgaggtgcagacaggcggcttcagcaaagagtctatcctgcccaagaggaacagcgacaagctgatcgccagaaagaaggactgggaccctaagaagtacggcggcttcgacagccccaccgtggcctattctgtgctggtggtggccaaagtggaaaagggcaagtccaagaaactgaagagtgtgaaagagctgctggggatcaccatcatggaaagaagcagcttcgagaagaatcccatcgactttctggaagccaagggctacaaagaagtgaaaaaggacctgatcatcaagctgcctaagtactccctgttcgagctggaaaacggccggaagagaatgctggcctctgccggcgaactgcagaagggaaacgaactggccctgccctccaaatatgtgaacttcctgtacctggccagccactatgagaagctgaagggctcccccgaggataatgagcagaaacagctgtttgtggaacagcacaaacactacctggacgagatcatcgagcagatcagcgagttctccaagagagtgatcctggccgacgctaatctggacaaggtgctgagcgcctacaacaagcacagagacaagcctatcagagagcaggccgagaatatcatccacctgtttaccctgaccaatctgggagcccctgccgccttcaagtactttgacaccaccatcgaccggaagaggtacaccagcaccaaagaggtgctggacgccaccctgatccaccagagcatcaccggcctgtacgagacacggatcgacctgtctcagctgggaggcgacgcctatccctatgacgtgcccgattatgccagcctgggcagcggctcccccaagaaaaaacgcaaggtggaagatcctaagaaaaagcggaaagtgtgataatagggatcccaagcacgcagcaatgcagctcaaaacgcttagcctagccacacccccacgggaaacagcagtgattaacctttagcaataaacgaaagtttaactaagctatactaaccccagggttggtcaatttcgtgccagccacaccctggtactgcatgcacgcaatgctagctgcccctttcccgtcctgggcaccccgagtctcccccgaccccgggtcccaggtatgctcccacctccacctgccccactcaccacctctgctagttccagacacctccgaagatgg

SEQ ID NO: 299 - RNA, 6943 nt, synthetic construct
  misc_feature 1..6943: note = V47 mRNA
  source 1..6943: mol_type = other RNA
aggactcactatttgttttcgcgcccagttgcaaaaagtgtcgacatttgcttctgacacaactgtgttcactagcaacctcaaacagacaccgccaccatgcctgctgctaagagagtgaaactggatggatccaaccatgaccaggaatttgaccccccaaaggtttacccacctgtgccagctgagaagaggaagcccatccgcgtgctgtctctctttgatgggattgctacagggctcctggtgctgaaggacctgggcatccaagtggaccgctacattgcctccgaggtgtgtgaggactccatcacggtgggcatggtgcggcaccagggaaagatcatgtacgtcggggacgtccgcagcgtcacacagaagcatatccaggagtggggcccattcgacctggtgattggaggcagtccctgcaatgacctctccattgtcaaccctgcccgcaagggactttatgagggtactggccgcctcttctttgagttctaccgcctcctgcatgatgcgcggcccaaggagggagatgatcgccccttcttctggctctttgagaatgtggtggccatgggcgttagtgacaagagggacatctcgcgatttcttgagtctaaccccgtgatgattgacgccaaagaagtgtctgctgcacacagggcccgttacttctggggtaaccttcctggcatgaacaggcctttggcatccactgtgaatgataagctggagctgcaagagtgtctggagcacggcagaatagccaagttcagcaaagtgaggaccattaccaccaggtcaaactctataaagcagggcaaagaccagcatttccccgtgttcatgaacgagaaggaggacatcctgtggtgcactgaaatggaaagggtgtttggcttccccgtccactacacagacgtctccaacatgagccgcttggcgaggcagagactgctgggccgatcgtggagcgtgccggtcatccgccacctcttcgctccgctgaaggaatattttgcttgtgtgtctagcggcaatagtaacgctaacagccgcgggccgagcttcagcagcggcctggtgccgttaagcttgcgcggcagccatatgttcgaaaccgtgcctgtgtggaggagacagccagtccgggtgctgtccctttttgaagacatcaagaaagagctgacgagtttgggctttttggaaagtggttctgacccgggacaactgaagcatgtggttgatgtcacagacacagtgaggaaggatgtggaggagtggggacccttcgatcttgtgtacggcgccacacctcccctgggccacacctgtgaccgtcctcccagctggtacctgttccagttccaccggctcctgcagtacgcacggcccaagccaggcagccccaggcccttcttctggatgttcgtggacaatctggtgctgaacaaggaagacctggacgtcgcatctcgcttcctggagatggagccagtcaccatcccagatgtccacggcggatccttgcagaatgctgtccgcgtgtggagcaacatcccagccataaggagcagcaggcactgggctctggtttcggaagaagaattgtccctgctggcccagaacaagcagagctcgaagctcgcggccaagtggcccaccaagctggtgaagaactgctttctccccctaagagaatatttcaagtatttttcaggagggccgagctctggcgcacccccaccaagtggagggtctcctgccgggtccccaacatctactgaagaaggcaccagcgaatccgcaacgcccgagtcaggccctggtacctccacagaaccatctgaaggtagtgcgcctggttccccagctggaagccctacttccaccgaagaaggcacgtcaaccgaaccaagtgaaggatctgcccctgggaccagcactgaaccatctgagcggacactcctgaccttcagagatgtggccatcgagttcagcctggaagagtggcagtgcctggacacagcccagcggaacctgtacagaaaagtgatgttcgagaactaccggaacctcgtgttcctgggaatcgccgtgtctaagccccacctgatcacctgtctcgagcaagggaaagaaccctggaacagcggcagcggcagcggatcaggcggatctggcagcggtggatctggttctggatccggcggctccggtagtggtggaagtggctctggggagacccccggtaccagcgagggcggccctggcacctccacagaaccatctgaaggtagtgcgcctggttccccagctggaagccctacttccaccgaagaaggcacgtcaaccgaaccaagtgaaggatctgcccctgggaccagcactgaaccatctgagccaaaaaagaagagaaaggtaatggacaagaagtacagcatcggcctggccatcggcaccaactctgtgggctgggccgtgatcaccgacgagtacaaggtgcccagcaagaaattcaaggtgctgggcaacaccgaccggcacagcatcaagaagaacctgatcggcgccctgctgttcgacagcggagaaacagccgaggccacccggctgaagagaaccgccagaagaagatacaccagacggaagaaccggatctgctatctgcaagagatcttcagcaacgagatggccaaggtggacgacagcttcttccacagactggaagagtccttcctggtggaagaggataagaagcacgagcggcaccccatcttcggcaacatcgtggacgaggtggcctaccacgagaagtaccccaccatctaccacctgagaaagaaactggtggacagcaccgacaaggccgacctgcggctgatctatctggccctggcccacatgatcaagttccggggccacttcctgatcgagggcgacctgaaccccgacaacagcgacgtggacaagctgttcatccagctggtgcagacctacaaccagctgttcgaggaaaaccccatcaacgccagcggcgtggacgccaaggccatcctgtctgccagactgagcaagagcagacggctggaaaatctgatcgcccagctgcccggcgagaagaagaatggcctgttcggcaacctgattgccctgagcctgggcctgacccccaacttcaagagcaacttcgacctggccgaggatgccaaactgcagctgagcaaggacacctacgacgacgacctggacaacctgctggcccagatcggcgaccagtacgccgacctgtttctggccgccaagaacctgtccgacgccatcctgctgagcgacatcctgagagtgaacaccgagatcaccaaggcccccctgagcgcctctatgatcaagagatacgacgagcaccaccaggacctgaccctgctgaaagctctcgtgcggcagcagctgcctgagaagtacaaagagattttcttcgaccagagcaagaacggctacgccggctacatcgatggcggagccagccaggaagagttctacaagttcatcaagcccatcctggaaaagatggacggcaccgaggaactgctcgtgaagctgaacagagaggacctgctgcggaagcagcggaccttcgacaacggcagcatcccccaccagatccacctgggagagctgcacgccattctgcggcggcaggaagatttttacccattcctgaaggacaaccgggaaaagatcgagaagatcctgaccttccgcatcccctactacgtgggccctctggccaggggaaacagcagattcgcctggatgaccagaaagagcgaggaaaccatcaccccctggaacttcgaggaagtggtggacaagggcgccagcgcccagagcttcatcgagcggatgaccaacttcgataagaacctgcccaacgagaaggtgctgcccaagcacagcctgctgtacgagtacttcaccgtgtacaacgagctgaccaaagtgaaatacgtgaccgagggaatgagaaagcccgccttcctgagcggcgagcagaaaaaagccatcgtggacctgctgttcaagaccaaccggaaagtgaccgtgaagcagctgaaagaggactacttcaagaaaatcgagtgcttcgactccgtggaaatctccggcgtggaagatcggttcaacgcctccctgggcacataccacgatctgctgaaaattatcaaggacaaggacttcctggacaatgaggaaaacgaggacattctggaagatatcgtgctgaccctgacactgtttgaggacagagagatgatcgaggaacggctgaaaacctatgcccacctgttcgacgacaaagtgatgaagcagctgaagcggcggagatacaccggctggggcaggctgagccggaagctgatcaacggcatccgggacaagcagtccggcaagacaatcctggatttcctgaagtccgacggcttcgccaacagaaacttcatgcagctgatccacgacgacagcctgacctttaaagaggacatccagaaagcccaggtgtccggccagggcgatagcctgcacgagcacattgccaatctggccggcagccccgccattaagaagggcatcctgcagacagtgaaggtggtggacgagctcgtgaaagtgatgggccggcacaagcccgagaacatcgtgatcgaaatggccagagagaaccagaccacccagaagggacagaagaacagccgcgagagaatgaagcggatcgaagagggcatcaaagagctgggcagccagatcctgaaagaacaccccgtggaaaacacccagctgcagaacgagaagctgtacctgtactacctgcagaatgggcgggatatgtacgtggaccaggaactggacatcaaccggctgtccgactacgatgtggacgctatcgtgcctcagagctttctgaaggacgactccatcgataacaaagtgctgactcggagcgacaagaaccggggcaagagcgacaacgtgccctccgaagaggtcgtgaagaagatgaagaactactggcgccagctgctgaatgccaagctgattacccagaggaagttcgacaatctgaccaaggccgagagaggcggcctgagcgaactggataaggccggcttcatcaagagacagctggtggaaacccggcagatcacaaagcacgtggcacagatcctggactcccggatgaacactaagtacgacgagaacgacaaactgatccgggaagtgaaagtgatcaccctgaagtccaagctggtgtccgatttccggaaggatttccagttttacaaagtgcgcgagatcaacaactaccaccacgcccacgacgcctacctgaacgccgtcgtgggaaccgccctgatcaaaaagtaccctaagctggaaagcgagttcgtgtacggcgactacaaggtgtacgacgtgcggaagatgatcgccaagagcgagcaggaaatcggcaaggctaccgccaagtacttcttctacagcaacatcatgaactttttcaagaccgagattaccctggccaacggcgagatccggaagcggcctctgatcgagacaaacggcgaaacaggcgagatcgtgtgggataagggccgggactttgccaccgtgcggaaagtgctgtctatgccccaagtgaatatcgtgaaaaagaccgaggtgcagacaggcggcttcagcaaagagtctatcctgcccaagaggaacagcgacaagctgatcgccagaaagaaggactgggaccctaagaagtacggcggcttcgacagccccaccgtggcctattctgtgctggtggtggccaaagtggaaaagggcaagtccaagaaactgaagagtgtgaaagagctgctggggatcaccatcatggaaagaagcagcttcgagaagaatcccatcgactttctggaagccaagggctacaaagaagtgaaaaaggacctgatcatcaagctgcctaagtactccctgttcgagctggaaaacggccggaagagaatgctggcctctgccggcgaactgcagaagggaaacgaactggccctgccctccaaatatgtgaacttcctgtacctggccagccactatgagaagctgaagggctcccccgaggataatgagcagaaacagctgtttgtggaacagcacaaacactacctggacgagatcatcgagcagatcagcgagttctccaagagagtgatcctggccgacgctaatctggacaaggtgctgagcgcctacaacaagcacagagacaagcctatcagagagcaggccgagaatatcatccacctgtttaccctgaccaatctgggagcccctgccgccttcaagtactttgacaccaccatcgaccggaagaggtacaccagcaccaaagaggtgctggacgccaccctgatccaccagagcatcaccggcctgtacgagacacggatcgacctgtctcagctgggaggcgacgcctatccctatgacgtgcccgattatgccagcctgggcagcggctcccccaagaaaaaacgcaaggtggaagatcctaagaaaaagcggaaagtggacggcctcgagtaatgagatcccaagcacgcagcaatgcagctcaaaacgcttagcctagccacacccccacgggaaacagcagtgattaacctttagcaataaacgaaagtttaactaagctatactaaccccagggttggtcaatttcgtgccagccacaccctggtactgcatgcacgcaatgctagctgcccctttcccgtcctgggcaccccgagtctcccccgaccccgggtcccaggtatgctcccacctccacctgccccactcaccacctctgctagttccagacacctccgagacgagg

SEQ ID NO: 300 - RNA, 6943 nt, synthetic construct
  misc_feature 1..6943: note = V48 mRNA
  source 1..6943: mol_type = other RNA
aggactcactatttgttttcgcgcccagttgcaaaaagtgtcgacatttgcttctgacacaactgtgttcactagcaacctcaaacagacaccgccaccatgcctgctgctaagagagtgaaactggatggatccaaccatgaccaggaatttgaccccccaaaggtttacccacctgtgccagctgagaagaggaagcccatccgcgtgctgtctctctttgatgggattgctacagggctcctggtgctgaaggacctgggcatccaagtggaccgctacattgcctccgaggtgtgtgaggactccatcacggtgggcatggtgcggcaccagggaaagatcatgtacgtcggggacgtccgcagcgtcacacagaagcatatccaggagtggggcccattcgacctggtgattggaggcagtccctgcaatgacctctccattgtcaaccctgcccgcaagggactttatgagggtactggccgcctcttctttgagttctaccgcctcctgcatgatgcgcggcccaaggagggagatgatcgccccttcttctggctctttgagaatgtggtggccatgggcgttagtgacaagagggacatctcgcgatttcttgagtctaaccccgtgatgattgacgccaaagaagtgtctgctgcacacagggcccgttacttctggggtaaccttcctggcatgaacaggcctttggcatccactgtgaatgataagctggagctgcaagagtgtctggagcacggcagaatagccaagttcagcaaagtgaggaccattaccaccaggtcaaactctataaagcagggcaaagaccagcatttccccgtgttcatgaacgagaaggaggacatcctgtggtgcactgaaatggaaagggtgtttggcttccccgtccactacacagacgtctccaacatgagccgcttggcgaggcagagactgctgggccgatcgtggagcgtgccggtcatccgccacctcttcgctccgctgaaggaatattttgcttgtgtgtctagcggcaatagtaacgctaacagccgcgggccgagcttcagcagcggcctggtgccgttaagcttgcgcggcagccatatgttcgaaaccgtgcctgtgtggaggagacagccagtccgggtgctgtccctttttgaagacatcaagaaagagctgacgagtttgggctttttggaaagtggttctgacccgggacaactgaagcatgtggttgatgtcacagacacagtgaggaaggatgtggaggagtggggacccttcgatcttgtgtacggcgccacacctcccctgggccacacctgtgaccgtcctcccagctggtacctgttccagttccaccggctcctgcagtacgcacggcccaagccaggcagccccaggcccttcttctggatgttcgtggacaatctggtgctgaacaaggaagacctggacgtcgcatctcgcttcctggagatggagccagtcaccatcccagatgtccacggcggatccttgcagaatgctgtccgcgtgtggagcaacatcccagccataaggagcagcaggcactgggctctggtttcggaagaagaattgtccctgctggcccagaacaagcagagctcgaagctcgcggccaagtggcccaccaagctggtgaagaactgctttctccccctaagagaatatttcaagtatttttcaggagggccgagctctggcgcacccccaccaagtggagggtctcctgccgggtccccaacatctactgaagaaggcaccagcgaatccgcaacgcccgagtcaggccctggtacctccacagaaccatctgaaggtagtgcgcctggttccccagctggaagccctacttccaccgaagaaggcacgtcaaccgaaccaagtgaaggatctgcccctgggaccagcactgaaccatctgagcggacactcctgacattcgaagatgtcgcagtgctgttcacccgggacgagtggaggaaactggctcccagccagcgcaatctgtatagagatgtgatgctggagaattacagaaatctcgtcagcctggggctgcccttcaccaagcctaaagtgatcagcctgctgcaacaaggcgaggatccttgggaaagcggcagcggcagcggatcaggcggatctggcagcggtggatctggttctggatccggcggctccggtagtggtggaagtggctctggggagacccccggtaccagcgagggcggccctggcacctccacagaaccatctgaaggtagtgcgcctggttccccagctggaagccctacttccaccgaagaaggcacgtcaaccgaaccaagtgaaggatctgcccctgggaccagcactgaaccatctgagccaaaaaagaagagaaaggtaatggacaagaagtacagcatcggcctggccatcggcaccaactctgtgggctgggccgtgatcaccgacgagtacaaggtgcccagcaagaaattcaaggtgctgggcaacaccgaccggcacagcatcaagaagaacctgatcggcgccctgctgttcgacagcggagaaacagccgaggccacccggctgaagagaaccgccagaagaagatacaccagacggaagaaccggatctgctatctgcaagagatcttcagcaacgagatggccaaggtggacgacagcttcttccacagactggaagagtccttcctggtggaagaggataagaagcacgagcggcaccccatcttcggcaacatcgtggacgaggtggcctaccacgagaagtaccccaccatctaccacctgagaaagaaactggtggacagcaccgacaaggccgacctgcggctgatctatctggccctggcccacatgatcaagttccggggccacttcctgatcgagggcgacctgaaccccgacaacagcgacgtggacaagctgttcatccagctggtgcagacctacaaccagctgttcgaggaaaaccccatcaacgccagcggcgtggacgccaaggccatcctgtctgccagactgagcaagagcagacggctggaaaatctgatcgcccagctgcccggcgagaagaagaatggcctgttcggcaacctgattgccctgagcctgggcctgacccccaacttcaagagcaacttcgacctggccgaggatgccaaactgcagctgagcaaggacacctacgacgacgacctggacaacctgctggcccagatcggcgaccagtacgccgacctgtttctggccgccaagaacctgtccgacgccatcctgctgagcgacatcctgagagtgaacaccgagatcaccaaggcccccctgagcgcctctatgatcaagagatacgacgagcaccaccaggacctgaccctgctgaaagctctcgtgcggcagcagctgcctgagaagtacaaagagattttcttcgaccagagcaagaacggctacgccggctacatcgatggcggagccagccaggaagagttctacaagttcatcaagcccatcctggaaaagatggacggcaccgaggaactgctcgtgaagctgaacagagaggacctgctgcggaagcagcggaccttcgacaacggcagcatcccccaccagatccacctgggagagctgcacgccattctgcggcggcaggaagatttttacccattcctgaaggacaaccgggaaaagatcgagaagatcctgaccttccgcatcccctactacgtgggccctctggccaggggaaacagcagattcgcctggatgaccagaaagagcgaggaaaccatcaccccctggaacttcgaggaagtggtggacaagggcgccagcgcccagagcttcatcgagcggatgaccaacttcgataagaacctgcccaacgagaaggtgctgcccaagcacagcctgctgtacgagtacttcaccgtgtacaacgagctgaccaaagtgaaatacgtgaccgagggaatgagaaagcccgccttcctgagcggcgagcagaaaaaagccatcgtggacctgctgttcaagaccaaccggaaagtgaccgtgaagcagctgaaagaggactacttcaagaaaatcgagtgcttcgactccgtggaaatctccggcgtggaagatcggttcaacgcctccctgggcacataccacgatctgctgaaaattatcaaggacaaggacttcctggacaatgaggaaaacgaggacattctggaagatatcgtgctgaccctgacactgtttgaggacagagagatgatcgaggaacggctgaaaacctatgcccacctgttcgacgacaaagtgatgaagcagctgaagcggcggagatacaccggctggggcaggctgagccggaagctgatcaacggcatccgggacaagcagtccggcaagacaatcctggatttcctgaagtccgacggcttcgccaacagaaacttcatgcagctgatccacgacgacagcctgacctttaaagaggacatccagaaagcccaggtgtccggccagggcgatagcctgcacgagcacattgccaatctggccggcagccccgccattaagaagggcatcctgcagacagtgaaggtggtggacgagctcgtgaaagtgatgggccggcacaagcccgagaacatcgtgatcgaaatggccagagagaaccagaccacccagaagggacagaagaacagccgcgagagaatgaagcggatcgaagagggcatcaaagagctgggcagccagatcctgaaagaacaccccgtggaaaacacccagctgcagaacgagaagctgtacctgtactacctgcagaatgggcgggatatgtacgtggaccaggaactggacatcaaccggctgtccgactacgatgtggacgctatcgtgcctcagagctttctgaaggacgactccatcgataacaaagtgctgactcggagcgacaagaaccggggcaagagcgacaacgtgccctccgaagaggtcgtgaagaagatgaagaactactggcgccagctgctgaatgccaagctgattacccagaggaagttcgacaatctgaccaaggccgagagaggcggcctgagcgaactggataaggccggcttcatcaagagacagctggtggaaacccggcagatcacaaagcacgtggcacagatcctggactcccggatgaacactaagtacgacgagaacgacaaactgatccgggaagtgaaagtgatcaccctgaagtccaagctggtgtccgatttccggaaggatttccagttttacaaagtgcgcgagatcaacaactaccaccacgcccacgacgcctacctgaacgccgtcgtgggaaccgccctgatcaaaaagtaccctaagctggaaagcgagttcgtgtacggcgactacaaggtgtacgacgtgcggaagatgatcgccaagagcgagcaggaaatcggcaaggctaccgccaagtacttcttctacagcaacatcatgaactttttcaagaccgagattaccctggccaacggcgagatccggaagcggcctctgatcgagacaaacggcgaaacaggcgagatcgtgtgggataagggccgggactttgccaccgtgcggaaagtgctgtctatgccccaagtgaatatcgtgaaaaagaccgaggtgcagacaggcggcttcagcaaagagtctatcctgcccaagaggaacagcgacaagctgatcgccagaaagaaggactgggaccctaagaagtacggcggcttcgacagccccaccgtggcctattctgtgctggtggtggccaaagtggaaaagggcaagtccaagaaactgaagagtgtgaaagagctgctggggatcaccatcatggaaagaagcagcttcgagaagaatcccatcgactttctggaagccaagggctacaaagaagtgaaaaaggacctgatcatcaagctgcctaagtactccctgttcgagctggaaaacggccggaagagaatgctggcctctgccggcgaactgcagaagggaaacgaactggccctgccctccaaatatgtgaacttcctgtacctggccagccactatgagaagctgaagggctcccccgaggataatgagcagaaacagctgtttgtggaacagcacaaacactacctggacgagatcatcgagcagatcagcgagttctccaagagagtgatcctggccgacgctaatctggacaaggtgctgagcgcctacaacaagcacagagacaagcctatcagagagcaggccgagaatatcatccacctgtttaccctgaccaatctgggagcccctgccgccttcaagtactttgacaccaccatcgaccggaagaggtacaccagcaccaaagaggtgctggacgccaccctgatccaccagagcatcaccggcctgtacgagacacggatcgacctgtctcagctgggaggcgacgcctatccctatgacgtgcccgattatgccagcctgggcagcggctcccccaagaaaaaacgcaaggtggaagatcctaagaaaaagcggaaagtggacggcctcgagtaatgagatcccaagcacgcagcaatgcagctcaaaacgcttagcctagccacacccccacgggaaacagcagtgattaacctttagcaataaacgaaagtttaactaagctatactaaccccagggttggtcaatttcgtgccagccacaccctggtactgcatgcacgcaatgctagctgcccctttcccgtcctgggcaccccgagtctcccccgaccccgggtcccaggtatgctcccacctccacctgccccactcaccacctctgctagttccagacacctccgagacgagg

SEQ ID NO: 301 - RNA, 6943 nt, synthetic construct
  misc_feature 1..6943: note = V49 mRNA
  source 1..6943: mol_type = other RNA
aggactcactatttgttttcgcgcccagttgcaaaaagtgtcgacatttgcttctgacacaactgtgttcactagcaacctcaaacagacaccgccaccatgcctgctgctaagagagtgaaactggatggatccaaccatgaccaggaatttgaccccccaaaggtttacccacctgtgccagctgagaagaggaagcccatccgcgtgctgtctctctttgatgggattgctacagggctcctggtgctgaaggacctgggcatccaagtggaccgctacattgcctccgaggtgtgtgaggactccatcacggtgggcatggtgcggcaccagggaaagatcatgtacgtcggggacgtccgcagcgtcacacagaagcatatccaggagtggggcccattcgacctggtgattggaggcagtccctgcaatgacctctccattgtcaaccctgcccgcaagggactttatgagggtactggccgcctcttctttgagttctaccgcctcctgcatgatgcgcggcccaaggagggagatgatcgccccttcttctggctctttgagaatgtggtggccatgggcgttagtgacaagagggacatctcgcgatttcttgagtctaaccccgtgatgattgacgccaaagaagtgtctgctgcacacagggcccgttacttctggggtaaccttcctggcatgaacaggcctttggcatccactgtgaatgataagctggagctgcaagagtgtctggagcacggcagaatagccaagttcagcaaagtgaggaccattaccaccaggtcaaactctataaagcagggcaaagaccagcatttccccgtgttcatgaacgagaaggaggacatcctgtggtgcactgaaatggaaagggtgtttggcttccccgtccactacacagacgtctccaacatgagccgcttggcgaggcagagactgctgggccgatcgtggagcgtgccggtcatccgccacctcttcgctccgctgaaggaatattttgcttgtgtgtctagcggcaatagtaacgctaacagccgcgggccgagcttcagcagcggcctggtgccgttaagcttgcgcggcagccatatgttcgaaaccgtgcctgtgtggaggagacagccagtccgggtgctgtccctttttgaagacatcaagaaagagctgacgagtttgggctttttggaaagtggttctgacccgggacaactgaagcatgtggttgatgtcacagacacagtgaggaaggatgtggaggagtggggacccttcgatcttgtgtacggcgccacacctcccctgggccacacctgtgaccgtcctcccagctggtacctgttccagttccaccggctcctgcagtacgcacggcccaagccaggcagccccaggcccttcttctggatgttcgtggacaatctggtgctgaacaaggaagacctggacgtcgcatctcgcttcctggagatggagccagtcaccatcccagatgtccacggcggatccttgcagaatgctgtccgcgtgtggagcaacatcccagccataaggagcagcaggcactgggctctggtttcggaagaagaattgtccctgctggcccagaacaagcagagctcgaagctcgcggccaagtggcccaccaagctggtgaagaactgctttctccccctaagagaatatttcaagtatttttcaggagggccgagctctggcgcacccccaccaagtggagggtctcctgccgggtccccaacatctactgaagaaggcaccagcgaatccgcaacgcccgagtcaggccctggtacctccacagaaccatctgaaggtagtgcgcctggttccccagctggaagccctacttccaccgaagaaggcacgtcaaccgaaccaagtgaaggatctgcccctgggaccagcactgaaccatctgagcggacactcgttaccttcgaagatgttgccgtgtacttcagccaagaagagtggcggctgctggatgacgcccagagactgctgtatcggaatgttatgctcgaaaacttcaccctgctggcttccctgggactcgccagctctaagacccacgagattacccagctggaatcctgggaagaacccttcatgagcggcagcggcagcggatcaggcggatctggcagcggtggatctggttctggatccggcggctccggtagtggtggaagtggctctggggagacccccggtaccagcgagggcggccctggcacctccacagaaccatctgaaggtagtgcgcctggttccccagctggaagccctacttccaccgaagaaggcacgtcaaccgaaccaagtgaaggatctgcccctgggaccagcactgaaccatctgagccaaaaaagaagagaaaggtaatggacaagaagtacagcatcggcctggccatcggcaccaactctgtgggctgggccgtgatcaccgacgagtacaaggtgcccagcaagaaattcaaggtgctgggcaacaccgaccggcacagcatcaagaagaacctgatcggcgccctgctgttcgacagcggagaaacagccgaggccacccggctgaagagaaccgccagaagaagatacaccagacggaagaaccggatctgctatctgcaagagatcttcagcaacgagatggccaaggtggacgacagcttcttccacagactggaagagtccttcctggtggaagaggataagaagcacgagcggcaccccatcttcggcaacatcgtggacgaggtggcctaccacgagaagtaccccaccatctaccacctgagaaagaaactggtggacagcaccgacaaggccgacctgcggctgatctatctggccctggcccacatgatcaagttccggggccacttcctgatcgagggcgacctgaaccccgacaacagcgacgtggacaagctgttcatccagctggtgcagacctacaaccagctgttcgaggaaaaccccatcaacgccagcggcgtggacgccaaggccatcctgtctgccagactgagcaagagcagacggctggaaaatctgatcgcccagctgcccggcgagaagaagaatggcctgttcggcaacctgattgccctgagcctgggcctgacccccaacttcaagagcaacttcgacctggccgaggatgccaaactgcagctgagcaaggacacctacgacgacgacctggacaacctgctggcccagatcggcgaccagtacgccgacctgtttctggccgccaagaacctgtccgacgccatcctgctgagcgacatcctgagagtgaacaccgagatcaccaaggcccccctgagcgcctctatgatcaagagatacgacgagcaccaccaggacctgaccctgctgaaagctctcgtgcggcagcagctgcctgagaagtacaaagagattttcttcgaccagagcaagaacggctacgccggctacatcgatggcggagccagccaggaagagttctacaagttcatcaagcccatcctggaaaagatggacggcaccgaggaactgctcgtgaagctgaacagagaggacctgctgcggaagcagcggaccttcgacaacggcagcatcccccaccagatccacctgggagagctgcacgccattctgcggcggcaggaagatttttacccattcctgaaggacaaccgggaaaagatcgagaagatcctgaccttccgcatcccctactacgtgggccctctggccaggggaaacagcagattcgcctggatgaccagaaagagcgaggaaaccatcaccccctggaacttcgaggaagtggtggacaagggcgccagcgcccagagcttcatcgagcggatgaccaacttcgataagaacctgcccaacgagaaggtgctgcccaagcacagcctgctgtacgagtacttcaccgtgtacaacgagctgaccaaagtgaaatacgtgaccgagggaatgagaaagcccgccttcctgagcggcgagcagaaaaaagccatcgtggacctgctgttcaagaccaaccggaaagtgaccgtgaagcagctgaaagaggactacttcaagaaaatcgagtgcttcgactccgtggaaatctccggcgtggaagatcggttcaacgcctccctgggcacataccacgatctgctgaaaattatcaaggacaaggacttcctggacaatgaggaaaacgaggacattctggaagatatcgtgctgaccctgacactgtttgaggacagagagatgatcgaggaacggctgaaaacctatgcccacctgttcgacgacaaagtgatgaagcagctgaagcggcggagatacaccggctggggcaggctgagccggaagctgatcaacggcatccgggacaagcagtccggcaagacaatcctggatttcctgaagtccgacggcttcgccaacagaaacttcatgcagctgatccacgacgacagcctgacctttaaagaggacatccagaaagcccaggtgtccggccagggcgatagcctgcacgagcacattgccaatctggccggcagccccgccattaagaagggcatcctgcagacagtgaaggtggtggacgagctcgtgaaagtgatgggccggcacaagcccgagaacatcgtgatcgaaatggccagagagaaccagaccacccagaagggacagaagaacagccgcgagagaatgaagcggatcgaagagggcatcaaagagctgggcagccagatcctgaaagaacaccccgtggaaaacacccagctgcagaacgagaagctgtacctgtactacctgcagaatgggcgggatatgtacgtggaccaggaactggacatcaaccggctgtccgactacgatgtggacgctatcgtgcctcagagctttctgaaggacgactccatcgataacaaagtgctgactcggagcgacaagaaccggggcaagagcgacaacgtgccctccgaagaggtcgtgaagaagatgaagaactactggcgccagctgctgaatgccaagctgattacccagaggaagttcgacaatctgaccaaggccgagagaggcggcctgagcgaactggataaggccggcttcatcaagagacagctggtggaaacccggcagatcacaaagcacgtggcacagatcctggactcccggatgaacactaagtacgacgagaacgacaaactgatccgggaagtgaaagtgatcaccctgaagtccaagctggtgtccgatttccggaaggatttccagttttacaaagtgcgcgagatcaacaactaccaccacgcccacgacgcctacctgaacgccgtcgtgggaaccgccctgatcaaaaagtaccctaagctggaaagcgagttcgtgtacggcgactacaaggtgtacgacgtgcggaagatgatcgccaagagcgagcaggaaatcggcaaggctaccgccaagtacttcttctacagcaacatcatgaactttttcaagaccgagattaccctggccaacggcgagatccggaagcggcctctgatcgagacaaacggcgaaacaggcgagatcgtgtgggataagggccgggactttgccaccgtgcggaaagtgctgtctatgccccaagtgaatatcgtgaaaaagaccgaggtgcagacaggcggcttcagcaaagagtctatcctgcccaagaggaacagcgacaagctgatcgccagaaagaaggactgggaccctaagaagtacggcggcttcgacagccccaccgtggcctattctgtgctggtggtggccaaagtggaaaagggcaagtccaagaaactgaagagtgtgaaagagctgctggggatcaccatcatggaaagaagcagcttcgagaagaatcccatcgactttctggaagccaagggctacaaagaagtgaaaaaggacctgatcatcaagctgcctaagtactccctgttcgagctggaaaacggccggaagagaatgctggcctctgccggcgaactgcagaagggaaacgaactggccctgccctccaaatatgtgaacttcctgtacctggccagccactatgagaagctgaagggctcccccgaggataatgagcagaaacagctgtttgtggaacagcacaaacactacctggacgagatcatcgagcagatcagcgagttctccaagagagtgatcctggccgacgctaatctggacaaggtgctgagcgcctacaacaagcacagagacaagcctatcagagagcaggccgagaatatcatccacctgtttaccctgaccaatctgggagcccctgccgccttcaagtactttgacaccaccatcgaccggaagaggtacaccagcaccaaagaggtgctggacgccaccctgatccaccagagcatcaccggcctgtacgagacacggatcgacctgtctcagctgggaggcgacgcctatccctatgacgtgcccgattatgccagcctgggcagcggctcccccaagaaaaaacgcaaggtggaagatcctaagaaaaagcggaaagtggacggcctcgagtaatgagatcccaagcacgcagcaatgcagctcaaaacgcttagcctagccacacccccacgggaaacagcagtgattaacctttagcaataaacgaaagtttaactaagctatactaaccccagggttggtcaatttcgtgccagccacaccctggtactgcatgcacgcaatgctagctgcccctttcccgtcctgggcaccccgagtctcccccgaccccgggtcccaggtatgctcccacctccacctgccccactcaccacctctgctagttccagacacctccgagacgagg

SEQ ID NO: 302 - RNA, 6984 nt, synthetic construct
  misc_feature 1..6984: note = V50 mRNA
  source 1..6984: mol_type = other RNA
aggactcactatttgttttcgcgcccagttgcaaaaagtgtcgacatttgcttctgacacaactgtgttcactagcaacctcaaacagacaccgccaccatggtccctgctgctaagagagtgaaactggatggatccgacaagaagtacagcatcggcctggccatcggcaccaactctgtgggctgggccgtgatcaccgacgagtacaaggtgcccagcaagaaattcaaggtgctgggcaacaccgaccggcacagcatcaagaagaacctgatcggcgccctgctgttcgacagcggagaaacagccgaggccacccggctgaagagaaccgccagaagaagatacaccagacggaagaaccggatctgctatctgcaagagatcttcagcaacgagatggccaaggtggacgacagcttcttccacagactggaagagtccttcctggtggaagaggataagaagcacgagcggcaccccatcttcggcaacatcgtggacgaggtggcctaccacgagaagtaccccaccatctaccacctgagaaagaaactggtggacagcaccgacaaggccgacctgcggctgatctatctggccctggcccacatgatcaagttccggggccacttcctgatcgagggcgacctgaaccccgacaacagcgacgtggacaagctgttcatccagctggtgcagacctacaaccagctgttcgaggaaaaccccatcaacgccagcggcgtggacgccaaggccatcctgtctgccagactgagcaagagcagacggctggaaaatctgatcgcccagctgcccggcgagaagaagaatggcctgttcggcaacctgattgccctgagcctgggcctgacccccaacttcaagagcaacttcgacctggccgaggatgccaaactgcagctgagcaaggacacctacgacgacgacctggacaacctgctggcccagatcggcgaccagtacgccgacctgtttctggccgccaagaacctgtccgacgccatcctgctgagcgacatcctgagagtgaacaccgagatcaccaaggcccccctgagcgcctctatgatcaagagatacgacgagcaccaccaggacctgaccctgctgaaagctctcgtgcggcagcagctgcctgagaagtacaaagagattttcttcgaccagagcaagaacggctacgccggctacatcgatggcggagccagccaggaagagttctacaagttcatcaagcccatcctggaaaagatggacggcaccgaggaactgctcgtgaagctgaacagagaggacctgctgcggaagcagcggaccttcgacaacggcagcatcccccaccagatccacctgggagagctgcacgccattctgcggcggcaggaagatttttacccattcctgaaggacaaccgggaaaagatcgagaagatcctgaccttccgcatcccctactacgtgggccctctggccaggggaaacagcagattcgcctggatgaccagaaagagcgaggaaaccatcaccccctggaacttcgaggaagtggtggacaagggcgccagcgcccagagcttcatcgagcggatgaccaacttcgataagaacctgcccaacgagaaggtgctgcccaagcacagcctgctgtacgagtacttcaccgtgtacaacgagctgaccaaagtgaaatacgtgaccgagggaatgagaaagcccgccttcctgagcggcgagcagaaaaaagccatcgtggacctgctgttcaagaccaaccggaaagtgaccgtgaagcagctgaaagaggactacttcaagaaaatcgagtgcttcgactccgtggaaatctccggcgtggaagatcggttcaacgcctccctgggcacataccacgatctgctgaaaattatcaaggacaaggacttcctggacaatgaggaaaacgaggacattctggaagatatcgtgctgaccctgacactgtttgaggacagagagatgatcgaggaacggctgaaaacctatgcccacctgttcgacgacaaagtgatgaagcagctgaagcggcggagatacaccggctggggcaggctgagccggaagctgatcaacggcatccgggacaagcagtccggcaagacaatcctggatttcctgaagtccgacggcttcgccaacagaaacttcatgcagctgatccacgacgacagcctgacctttaaagaggacatccagaaagcccaggtgtccggccagggcgatagcctgcacgagcacattgccaatctggccggcagccccgccattaagaagggcatcctgcagacagtgaaggtggtggacgagctcgtgaaagtgatgggccggcacaagcccgagaacatcgtgatcgaaatggccagagagaaccagaccacccagaagggacagaagaacagccgcgagagaatgaagcggatcgaagagggcatcaaagagctgggcagccagatcctgaaagaacaccccgtggaaaacacccagctgcagaacgagaagctgtacctgtactacctgcagaatgggcgggatatgtacgtggaccaggaactggacatcaaccggctgtccgactacgatgtggacgctatcgtgcctcagagctttctgaaggacgactccatcgataacaaagtgctgactcggagcgacaagaaccggggcaagagcgacaacgtgccctccgaagaggtcgtgaagaagatgaagaactactggcgccagctgctgaatgccaagctgattacccagaggaagttcgacaatctgaccaaggccgagagaggcggcctgagcgaactggataaggccggcttcatcaagagacagctggtggaaacccggcagatcacaaagcacgtggcacagatcctggactcccggatgaacactaagtacgacgagaacgacaaactgatccgggaagtgaaagtgatcaccctgaagtccaagctggtgtccgatttccggaaggatttccagttttacaaagtgcgcgagatcaacaactaccaccacgcccacgacgcctacctgaacgccgtcgtgggaaccgccctgatcaaaaagtaccctaagctggaaagcgagttcgtgtacggcgactacaaggtgtacgacgtgcggaagatgatcgccaagagcgagcaggaaatcggcaaggctaccgccaagtacttcttctacagcaacatcatgaactttttcaagaccgagattaccctggccaacggcgagatccggaagcggcctctgatcgagacaaacggcgaaacaggcgagatcgtgtgggataagggccgggactttgccaccgtgcggaaagtgctgtctatgccccaagtgaatatcgtgaaaaagaccgaggtgcagacaggcggcttcagcaaagagtctatcctgcccaagaggaacagcgacaagctgatcgccagaaagaaggactgggaccctaagaagtacggcggcttcgacagccccaccgtggcctattctgtgctggtggtggccaaagtggaaaagggcaagtccaagaaactgaagagtgtgaaagagctgctggggatcaccatcatggaaagaagcagcttcgagaagaatcccatcgactttctggaagccaagggctacaaagaagtgaaaaaggacctgatcatcaagctgcctaagtactccctgttcgagctggaaaacggccggaagagaatgctggcctctgccggcgaactgcagaagggaaacgaactggccctgccctccaaatatgtgaacttcctgtacctggccagccactatgagaagctgaagggctcccccgaggataatgagcagaaacagctgtttgtggaacagcacaaacactacctggacgagatcatcgagcagatcagcgagttctccaagagagtgatcctggccgacgctaatctggacaaggtgctgagcgcctacaacaagcacagagacaagcctatcagagagcaggccgagaatatcatccacctgtttaccctgaccaatctgggagcccctgccgccttcaagtactttgacaccaccatcgaccggaagaggtacaccagcaccaaagaggtgctggacgccaccctgatccaccagagcatcaccggcctgtacgagacacggatcgacctgtctcagctgggaggcgacgcctatccctatgacgtgcccgattatgccagcctgggcagcggctcccccaagaaaaaacgcaaggtggaagatcctaagaaaaagcggaaagtggacggcggagggccgagctctggcgcacccccaccaagtggagggtctcctgccgggtccccaacatctactgaagaaggcaccagcgaatccgcaacgcccgagtcaggccctggtacctccacagaaccatctgaaggtagtgcgcctggttccccagctggaagccctacttccaccgaagaaggcacgtcaaccgaaccaagtgaaggatctgcccctgggaccagcactgaaccatctgagatgggccctatggagatatacaagacagtgtctgcatggaagagacagccagtgcgggtactgagcctcttcagaaacatcgacaaggtactaaagagtttgggcttcttggaaagcggttctggttctgggggaggaacgctgaagtacgtggaagatgtcacaaatgtcgtgaggagagacgtggagaaatggggcccctttgacctggtgtacggctcgacgcagcccctaggcagctcttgtgatcgctgtcccggctggtacatgttccagttccaccggatcctgcagtatgcgctgcctcgccaggagagtcagcggcccttcttctggatattcatggacaatctgctgctgactgaggatgaccaagagacaactacccgcttccttcagacagaggctgtgaccctccaggatgtccgtggcagagactaccagaatgctatgcgggtgtggagcaacattccagggctgaagagcaagcatgcgcccctgaccccaaaggaagaagagtatctgcaagcccaagtcagaagcaggagcaagctggacgccccgaaagttgacctcctggtgaagaactgccttctcccgctgagagagtacttcaagtatttttctcaaaactcacttcctctttctagcggcaatagtaacgctaacagccgcgggccgagcttcagcagcggcctggtgccgttaagcttgcgcggcagccatatgaaccatgaccaggaatttgaccccccaaaggtttacccacctgtgccagctgagaagaggaagcccatccgcgtgctgtctctctttgatgggattgctacagggctcctggtgctgaaggacctgggcatccaagtggaccgctacattgcctccgaggtgtgtgaggactccatcacggtgggcatggtgcggcaccagggaaagatcatgtacgtcggggacgtccgcagcgtcacacagaagcatatccaggagtggggcccattcgacctggtgattggaggcagtccctgcaatgacctctccattgtcaaccctgcccgcaagggactttatgagggtactggccgcctcttctttgagttctaccgcctcctgcatgatgcgcggcccaaggagggagatgatcgccccttcttctggctctttgagaatgtggtggccatgggcgttagtgacaagagggacatctcgcgatttcttgagtctaaccccgtgatgattgacgccaaagaagtgtctgctgcacacagggcccgttacttctggggtaaccttcctggcatgaacaggcctttggcatccactgtgaatgataagctggagctgcaagagtgtctggagcacggcagaatagccaagttcagcaaagtgaggaccattaccaccaggtcaaactctataaagcagggcaaagaccagcatttccccgtcttcatgaacgagaaggaggacatcctgtggtgcactgaaatggaaagggtgtttggcttccccgtccactacacagacgtctccaacatgagccgcttggcgaggcagagactgctgggccgatcgtggagcgtgccggtcatccgccacctcttcgctccgctgaaggaatattttgcttgtgtggacggcagcggcagcgagacccccggtaccagcgagagcgccacccccgagagccggacactggtgaccttcaaggatgtatttgtggacttcaccagggaggagtggaagctgctggacactgctcagcagatcgtgtacagaaatgtgatgctggagaactataagaacctggtttccttgggttatcagcttactaagccagatgtgatcctccggttggagaagggagaagagcccggcagcggcagcgagacccccggtaccagcgagagcgccacccccgagagccggacactggtgaccttcaaggatgtatttgtggacttcaccagggaggagtggaagctgctggacactgctcagcagatcgtgtacagaaatgtgatgctggagaactataagaacctggtttccttgggttatcagcttactaagccagatgtgatcctccggttggagaagggagaagagccctgagatcccaagcacgcagcaatgcagctcaaaacgcttagcctagccacacccccacgggaaacagcagtgattaacctttagcaataaacgaaagtttaactaagctatactaaccccagggttggtcaatttcgtgccagccacaccctggtactgcatgcacgcaatgctagctgcccctttcccgtcctgggcaccccgagtctcccccgaccccgggtcccaggtatgctcccacctccacctgccccactcaccacctctgctagttccagacacctccgaagatgg

SEQ ID NO: 303 - RNA, 7221 nt, synthetic construct
  misc_feature 1..7221: note = V51 mRNA
  source 1..7221: mol_type = other RNA
aggactcactatttgttttcgcgcccagttgcaaaaagtgtcgacatttgcttctgacacaactgtgttcactagcaacctcaaacagacaccgccaccatggtccctgctgctaagagagtgaaactggatggatccgacaagaagtacagcatcggcctggccatcggcaccaactctgtgggctgggccgtgatcaccgacgagtacaaggtgcccagcaagaaattcaaggtgctgggcaacaccgaccggcacagcatcaagaagaacctgatcggcgccctgctgttcgacagcggagaaacagccgaggccacccggctgaagagaaccgccagaagaagatacaccagacggaagaaccggatctgctatctgcaagagatcttcagcaacgagatggccaaggtggacgacagcttcttccacagactggaagagtccttcctggtggaagaggataagaagcacgagcggcaccccatcttcggcaacatcgtggacgaggtggcctaccacgagaagtaccccaccatctaccacctgagaaagaaactggtggacagcaccgacaaggccgacctgcggctgatctatctggccctggcccacatgatcaagttccggggccacttcctgatcgagggcgacctgaaccccgacaacagcgacgtggacaagctgttcatccagctggtgcagacctacaaccagctgttcgaggaaaaccccatcaacgccagcggcgtggacgccaaggccatcctgtctgccagactgagcaagagcagacggctggaaaatctgatcgcccagctgcccggcgagaagaagaatggcctgttcggcaacctgattgccctgagcctgggcctgacccccaacttcaagagcaacttcgacctggccgaggatgccaaactgcagctgagcaaggacacctacgacgacgacctggacaacctgctggcccagatcggcgaccagtacgccgacctgtttctggccgccaagaacctgtccgacgccatcctgctgagcgacatcctgagagtgaacaccgagatcaccaaggcccccctgagcgcctctatgatcaagagatacgacgagcaccaccaggacctgaccctgctgaaagctctcgtgcggcagcagctgcctgagaagtacaaagagattttcttcgaccagagcaagaacggctacgccggctacatcgatggcggagccagccaggaagagttctacaagttcatcaagcccatcctggaaaagatggacggcaccgaggaactgctcgtgaagctgaacagagaggacctgctgcggaagcagcggaccttcgacaacggcagcatcccccaccagatccacctgggagagctgcacgccattctgcggcggcaggaagatttttacccattcctgaaggacaaccgggaaaagatcgagaagatcctgaccttccgcatcccctactacgtgggccctctggccaggggaaacagcagattcgcctggatgaccagaaagagcgaggaaaccatcaccccctggaacttcgaggaagtggtggacaagggcgccagcgcccagagcttcatcgagcggatgaccaacttcgataagaacctgcccaacgagaaggtgctgcccaagcacagcctgctgtacgagtacttcaccgtgtacaacgagctgaccaaagtgaaatacgtgaccgagggaatgagaaagcccgccttcctgagcggcgagcagaaaaaagccatcgtggacctgctgttcaagaccaaccggaaagtgaccgtgaagcagctgaaagaggactacttcaagaaaatcgagtgcttcgactccgtggaaatctccggcgtggaagatcggttcaacgcctccctgggcacataccacgatctgctgaaaattatcaaggacaaggacttcctggacaatgaggaaaacgaggacattctggaagatatcgtgctgaccctgacactgtttgaggacagagagatgatcgaggaacggctgaaaacctatgcccacctgttcgacgacaaagtgatgaagcagctgaagcggcggagatacaccggctggggcaggctgagccggaagctgatcaacggcatccgggacaagcagtccggcaagacaatcctggatttcctgaagtccgacggcttcgccaacagaaacttcatgcagctgatccacgacgacagcctgacctttaaagaggacatccagaaagcccaggtgtccggccagggcgatagcctgcacgagcacattgccaatctggccggcagccccgccattaagaagggcatcctgcagacagtgaaggtggtggacgagctcgtgaaagtgatgggccggcacaagcccgagaacatcgtgatcgaaatggccagagagaaccagaccacccagaagggacagaagaacagccgcgagagaatgaagcggatcgaagagggcatcaaagagctgggcagccagatcctgaaagaacaccccgtggaaaacacccagctgcagaacgagaagctgtacctgtactacctgcagaatgggcgggatatgtacgtggaccaggaactggacatcaaccggctgtccgactacgatgtggacgctatcgtgcctcagagctttctgaaggacgactccatcgataacaaagtgctgactcggagcgacaagaaccggggcaagagcgacaacgtgccctccgaagaggtcgtgaagaagatgaagaactactggcgccagctgctgaatgccaagctgattacccagaggaagttcgacaatctgaccaaggccgagagaggcggcctgagcgaactggataaggccggcttcatcaagagacagctggtggaaacccggcagatcacaaagcacgtggcacagatcctggactcccggatgaacactaagtacgacgagaacgacaaactgatccgggaagtgaaagtgatcaccctgaagtccaagctggtgtccgatttccggaaggatttccagttttacaaagtgcgcgagatcaacaactaccaccacgcccacgacgcctacctgaacgccgtcgtgggaaccgccctgatcaaaaagtaccctaagctggaaagcgagttcgtgtacggcgactacaaggtgtacgacgtgcggaagatgatcgccaagagcgagcaggaaatcggcaaggctaccgccaagtacttcttctacagcaacatcatgaactttttcaagaccgagattaccctggccaacggcgagatccggaagcggcctctgatcgagacaaacggcgaaacaggcgagatcgtgtgggataagggccgggactttgccaccgtgcggaaagtgctgtctatgccccaagtgaatatcgtgaaaaagaccgaggtgcagacaggcggcttcagcaaagagtctatcctgcccaagaggaacagcgacaagctgatcgccagaaagaaggactgggaccctaagaagtacggcggcttcgacagccccaccgtggcctattctgtgctggtggtggccaaagtggaaaagggcaagtccaagaaactgaagagtgtgaaagagctgctggggatcaccatcatggaaagaagcagcttcgagaagaatcccatcgactttctggaagccaagggctacaaagaagtgaaaaaggacctgatcatcaagctgcctaagtactccctgttcgagctggaaaacggccggaagagaatgctggcctctgccggcgaactgcagaagggaaacgaactggccctgccctccaaatatgtgaacttcctgtacctggccagccactatgagaagctgaagggctcccccgaggataatgagcagaaacagctgtttgtggaacagcacaaacactacctggacgagatcatcgagcagatcagcgagttctccaagagagtgatcctggccgacgctaatctggacaaggtgctgagcgcctacaacaagcacagagacaagcctatcagagagcaggccgagaatatcatccacctgtttaccctgaccaatctgggagcccctgccgccttcaagtactttgacaccaccatcgaccggaagaggtacaccagcaccaaagaggtgctggacgccaccctgatccaccagagcatcaccggcctgtacgagacacggatcgacctgtctcagctgggaggcgacgcctatccctatgacgtgcccgattatgccagcctgggcagcggctcccccaagaaaaaacgcaaggtggaagatcctaagaaaaagcggaaagtggacggcggagggccgagctctggcgcacccccaccaagtggagggtctcctgccgggtccccaacatctactgaagaaggcaccagcgaatccgcaacgcccgagtcaggccctggtacctccacagaaccatctgaaggtagtgcgcctggttccccagctggaagccctacttccaccgaagaaggcacgtcaaccgaaccaagtgaaggatctgcccctgggaccagcactgaaccatctgagatgggccctatggagatatacaagacagtgtctgcatggaagagacagccagtgcgggtactgagcctcttcagaaacatcgacaaggtactaaagagtttgggcttcttggaaagcggttctggttctgggggaggaacgctgaagtacgtggaagatgtcacaaatgtcgtgaggagagacgtggagaaatggggcccctttgacctggtgtacggctcgacgcagcccctaggcagctcttgtgatcgctgtcccggctggtacatgttccagttccaccggatcctgcagtatgcgctgcctcgccaggagagtcagcggcccttcttctggatattcatggacaatctgctgctgactgaggatgaccaagagacaactacccgcttccttcagacagaggctgtgaccctccaggatgtccgtggcagagactaccagaatgctatgcgggtgtggagcaacattccagggctgaagagcaagcatgcgcccctgaccccaaaggaagaagagtatctgcaagcccaagtcagaagcaggagcaagctggacgccccgaaagttgacctcctggtgaagaactgccttctcccgctgagagagtacttcaagtatttttctcaaaactcacttcctctttctagcggcaatagtaacgctaacagccgcgggccgagcttcagcagcggcctggtgccgttaagcttgcgcggcagccatatgaaccatgaccaggaatttgaccccccaaaggtttacccacctgtgccagctgagaagaggaagcccatccgcgtgctgtctctctttgatgggattgctacagggctcctggtgctgaaggacctgggcatccaagtggaccgctacattgcctccgaggtgtgtgaggactccatcacggtgggcatggtgcggcaccagggaaagatcatgtacgtcggggacgtccgcagcgtcacacagaagcatatccaggagtggggcccattcgacctggtgattggaggcagtccctgcaatgacctctccattgtcaaccctgcccgcaagggactttatgagggtactggccgcctcttctttgagttctaccgcctcctgcatgatgcgcggcccaaggagggagatgatcgccccttcttctggctctttgagaatgtggtggccatgggcgttagtgacaagagggacatctcgcgatttcttgagtctaaccccgtgatgattgacgccaaagaagtgtctgctgcacacagggcccgttacttctggggtaaccttcctggcatgaacaggcctttggcatccactgtgaatgataagctggagctgcaagagtgtctggagcacggcagaatagccaagttcagcaaagtgaggaccattaccaccaggtcaaactctataaagcagggcaaagaccagcatttccccgtcttcatgaacgagaaggaggacatcctgtggtgcactgaaatggaaagggtgtttggcttccccgtccactacacagacgtctccaacatgagccgcttggcgaggcagagactgctgggccgatcgtggagcgtgccggtcatccgccacctcttcgctccgctgaaggaatattttgcttgtgtggacggcagcggcagcgagacccccggtaccagcgagagcgccacccccgagagccggacactggtgaccttcaaggatgtatttgtggacttcaccagggaggagtggaagctgctggacactgctcagcagatcgtgtacagaaatgtgatgctggagaactataagaacctggtttccttgggttatcagcttactaagccagatgtgatcctccggttggagaagggagaagagcccggcagcggcagcgagacccccggtaccagcgagagcgccacccccgagagccggacactggtgaccttcaaggatgtatttgtggacttcaccagggaggagtggaagctgctggacactgctcagcagatcgtgtacagaaatgtgatgctggagaactataagaacctggtttccttgggttatcagcttactaagccagatgtgatcctccggttggagaagggagaagagcccggcagcggcagcgagacccccggtaccagcgagagcgccacccccgagagccggacactggtgaccttcaaggatgtatttgtggacttcaccagggaggagtggaagctgctggacactgctcagcagatcgtgtacagaaatgtgatgctggagaactataagaacctggtttccttgggttatcagcttactaagccagatgtgatcctccggttggagaagggagaagagccctgagatcccaagcacgcagcaatgcagctcaaaacgcttagcctagccacacccccacgggaaacagcagtgattaacctttagcaataaacgaaagtttaactaagctatactaaccccagggttggtcaatttcgtgccagccacaccctggtactgcatgcacgcaatgctagctgcccctttcccgtcctgggcaccccgagtctcccccgaccccgggtcccaggtatgctcccacctccacctgccccactcaccacctctgctagttccagacacctccgaagatgg

SEQ ID NO: 304 - RNA, 7209 nt, synthetic construct
  misc_feature 1..7209: note = V52 mRNA
  source 1..7209: mol_type = other RNA
aggactcactatttgttttcgcgcccagttgcaaaaagtgtcgacatttgcttctgacacaactgtgttcactagcaacctcaaacagacaccgccaccatggtccctgctgctaagagagtgaaactggatggatccgacaagaagtacagcatcggcctggccatcggcaccaactctgtgggctgggccgtgatcaccgacgagtacaaggtgcccagcaagaaattcaaggtgctgggcaacaccgaccggcacagcatcaagaagaacctgatcggcgccctgctgttcgacagcggagaaacagccgaggccacccggctgaagagaaccgccagaagaagatacaccagacggaagaaccggatctgctatctgcaagagatcttcagcaacgagatggccaaggtggacgacagcttcttccacagactggaagagtccttcctggtggaagaggataagaagcacgagcggcaccccatcttcggcaacatcgtggacgaggtggcctaccacgagaagtaccccaccatctaccacctgagaaagaaactggtggacagcaccgacaaggccgacctgcggctgatctatctggccctggcccacatgatcaagttccggggccacttcctgatcgagggcgacctgaaccccgacaacagcgacgtggacaagctgttcatccagctggtgcagacctacaaccagctgttcgaggaaaaccccatcaacgccagcggcgtggacgccaaggccatcctgtctgccagactgagcaagagcagacggctggaaaatctgatcgcccagctgcccggcgagaagaagaatggcctgttcggcaacctgattgccctgagcctgggcctgacccccaacttcaagagcaacttcgacctggccgaggatgccaaactgcagctgagcaaggacacctacgacgacgacctggacaacctgctggcccagatcggcgaccagtacgccgacctgtttctggccgccaagaacctgtccgacgccatcctgctgagcgacatcctgagagtgaacaccgagatcaccaaggcccccctgagcgcctctatgatcaagagatacgacgagcaccaccaggacctgaccctgctgaaagctctcgtgcggcagcagctgcctgagaagtacaaagagattttcttcgaccagagcaagaacggctacgccggctacatcgatggcggagccagccaggaagagttctacaagttcatcaagcccatcctggaaaagatggacggcaccgaggaactgctcgtgaagctgaacagagaggacctgctgcggaagcagcggaccttcgacaacggcagcatcccccaccagatccacctgggagagctgcacgccattctgcggcggcaggaagatttttacccattcctgaaggacaaccgggaaaagatcgagaagatcctgaccttccgcatcccctactacgtgggccctctggccaggggaaacagcagattcgcctggatgaccagaaagagcgaggaaaccatcaccccctggaacttcgaggaagtggtggacaagggcgccagcgcccagagcttcatcgagcggatgaccaacttcgataagaacctgcccaacgagaaggtgctgcccaagcacagcctgctgtacgagtacttcaccgtgtacaacgagctgaccaaagtgaaatacgtgaccgagggaatgagaaagcccgccttcctgagcggcgagcagaaaaaagccatcgtggacctgctgttcaagaccaaccggaaagtgaccgtgaagcagctgaaagaggactacttcaagaaaatcgagtgcttcgactccgtggaaatctccggcgtggaagatcggttcaacgcctccctgggcacataccacgatctgctgaaaattatcaaggacaaggacttcctggacaatgaggaaaacgaggacattctggaagatatcgtgctgaccctgacactgtttgaggacagagagatgatcgaggaacggctgaaaacctatgcccacctgttcgacgacaaagtgatgaagcagctgaagcggcggagatacaccggctggggcaggctgagccggaagctgatcaacggcatccgggacaagcagtccggcaagacaatcctggatttcctgaagtccgacggcttcgccaacagaaacttcatgcagctgatccacgacgacagcctgacctttaaagaggacatccagaaagcccaggtgtccggccagggcgatagcctgcacgagcacattgccaatctggccggcagccccgccattaagaagggcatcctgcagacagtgaaggtggtggacgagctcgtgaaagtgatgggccggcacaagcccgagaacatcgtgatcgaaatggccagagagaaccagaccacccagaagggacagaagaacagccgcgagagaatgaagcggatcgaagagggcatcaaagagctgggcagccagatcctgaaagaacaccccgtggaaaacacccagctgcagaacgagaagctgtacctgtactacctgcagaatgggcgggatatgtacgtggaccaggaactggacatcaaccggctgtccgactacgatgtggacgctatcgtgcctcagagctttctgaaggacgactccatcgataacaaagtgctgactcggagcgacaagaaccggggcaagagcgacaacgtgccctccgaagaggtcgtgaagaagatgaagaactactggcgccagctgctgaatgccaagctgattacccagaggaagttcgacaatctgaccaaggccgagagaggcggcctgagcgaactggataaggccggcttcatcaagagacagctggtggaaacccggcagatcacaaagcacgtggcacagatcctggactcccggatgaacactaagtacgacgagaacgacaaactgatccgggaagtgaaagtgatcaccctgaagtccaagctggtgtccgatttccggaaggatttccagttttacaaagtgcgcgagatcaacaactaccaccacgcccacgacgcctacctgaacgccgtcgtgggaaccgccctgatcaaaaagtaccctaagctggaaagcgagttcgtgtacggcgactacaaggtgtacgacgtgcggaagatgatcgccaagagcgagcaggaaatcggcaaggctaccgccaagtacttcttctacagcaacatcatgaactttttcaagaccgagattaccctggccaacggcgagatccggaagcggcctctgatcgagacaaacggcgaaacaggcgagatcgtgtgggataagggccgggactttgccaccgtgcggaaagtgctgtctatgccccaagtgaatatcgtgaaaaagaccgaggtgcagacaggcggcttcagcaaagagtctatcctgcccaagaggaacagcgacaagctgatcgccagaaagaaggactgggaccctaagaagtacggcggcttcgacagccccaccgtggcctattctgtgctggtggtggccaaagtggaaaagggcaagtccaagaaactgaagagtgtgaaagagctgctggggatcaccatcatggaaagaagcagcttcgagaagaatcccatcgactttctggaagccaagggctacaaagaagtgaaaaaggacctgatcatcaagctgcctaagtactccctgttcgagctggaaaacggccggaagagaatgctggcctctgccggcgaactgcagaagggaaacgaactggccctgccctccaaatatgtgaacttcctgtacctggccagccactatgagaagctgaagggctcccccgaggataatgagcagaaacagctgtttgtggaacagcacaaacactacctggacgagatcatcgagcagatcagcgagttctccaagagagtgatcctggccgacgctaatctggacaaggtgctgagcgcctacaacaagcacagagacaagcctatcagagagcaggccgagaatatcatccacctgtttaccctgaccaatctgggagcccctgccgccttcaagtactttgacaccaccatcgaccggaagaggtacaccagcaccaaagaggtgctggacgccaccctgatccaccagagcatcaccggcctgtacgagacacggatcgacctgtctcagctgggaggcgacgcctatccctatgacgtgcccgattatgccagcctgggcagcggctcccccaagaaaaaacgcaaggtggaagatcctaagaaaaagcggaaagtggacggcggagggccgagctctggcgcacccccaccaagtggagggtctcctgccgggtccccaacatctactgaagaaggcaccagcgaatccgcaacgcccgagtcaggccctggtacctccacagaaccatctgaaggtagtgcgcctggttccccagctggaagccctacttccaccgaagaaggcacgtcaaccgaaccaagtgaaggatctgcccctgggaccagcactgaaccatctgagcggacactggtgaccttcaaggatgtatttgtggacttcaccagggaggagtggaagctgctggacactgctcagcagatcgtgtacagaaatgtgatgctggagaactataagaacctggtttccttgggttatcagcttactaagccagatgtgatcctccggttggagaagggagaagagcccagcggcagcgagacccccggtaccagcgagagcgctacacccgaatccggccccggcagccccgccggcagccctacaagcaccgaggagggcacctccgaatccgccacccctgagagcggacccggcagcgagcctgccacaagcggcagcgagacacctggaacaagcgagagcgccacacctgaaagcggccccggaacatccaccgagcctagcgagggcagcgcccctggcacaagcacagagccttccgagagcgccacccccgagagcatgggccctatggagatatacaagacagtgtctgcatggaagagacagccagtgcgggtactgagcctcttcagaaacatcgacaaggtactaaagagtttgggcttcttggaaagcggttctggttctgggggaggaacgctgaagtacgtggaagatgtcacaaatgtcgtgaggagagacgtggagaaatggggcccctttgacctggtgtacggctcgacgcagcccctaggcagctcttgtgatcgctgtcccggctggtacatgttccagttccaccggatcctgcagtatgcgctgcctcgccaggagagtcagcggcccttcttctggatattcatggacaatctgctgctgactgaggatgaccaagagacaactacccgcttccttcagacagaggctgtgaccctccaggatgtccgtggcagagactaccagaatgctatgcgggtgtggagcaacattccagggctgaagagcaagcatgcgcccctgaccccaaaggaagaagagtatctgcaagcccaagtcagaagcaggagcaagctggacgccccgaaagttgacctcctggtgaagaactgccttctcccgctgagagagtacttcaagtatttttctcaaaactcacttcctctttctagcggcaatagtaacgctaacagccgcgggccgagcttcagcagcggcctggtgccgttaagcttgcgcggcagccatatgaaccatgaccaggaatttgaccccccaaaggtttacccacctgtgccagctgagaagaggaagcccatccgcgtgctgtctctctttgatgggattgctacagggctcctggtgctgaaggacctgggcatccaagtggaccgctacattgcctccgaggtgtgtgaggactccatcacggtgggcatggtgcggcaccagggaaagatcatgtacgtcggggacgtccgcagcgtcacacagaagcatatccaggagtggggcccattcgacctggtgattggaggcagtccctgcaatgacctctccattgtcaaccctgcccgcaagggactttatgagggtactggccgcctcttctttgagttctaccgcctcctgcatgatgcgcggcccaaggagggagatgatcgccccttcttctggctctttgagaatgtggtggccatgggcgttagtgacaagagggacatctcgcgatttcttgagtctaaccccgtgatgattgacgccaaagaagtgtctgctgcacacagggcccgttacttctggggtaaccttcctggcatgaacaggcctttggcatccactgtgaatgataagctggagctgcaagagtgtctggagcacggcagaatagccaagttcagcaaagtgaggaccattaccaccaggtcaaactctataaagcagggcaaagaccagcatttccccgtcttcatgaacgagaaggaggacatcctgtggtgcactgaaatggaaagggtgtttggcttccccgtccactacacagacgtctccaacatgagccgcttggcgaggcagagactgctgggccgatcgtggagcgtgccggtcatccgccacctcttcgctccgctgaaggaatattttgcttgtgtggacggcagcggcagcgagacccccggtaccagcgagagcgccacccccgagagccggacactggtgaccttcaaggatgtatttgtggacttcaccagggaggagtggaagctgctggacactgctcagcagatcgtgtacagaaatgtgatgctggagaactataagaacctggtttccttgggttatcagcttactaagccagatgtgatcctccggttggagaagggagaagagccctgagatcccaagcacgcagcaatgcagctcaaaacgcttagcctagccacacccccacgggaaacagcagtgattaacctttagcaataaacgaaagtttaactaagctatactaaccccagggttggtcaatttcgtgccagccacaccctggtactgcatgcacgcaatgctagctgcccctttcccgtcctgggcaccccgagtctcccccgaccccgggtcccaggtatgctcccacctccacctgccccactcaccacctctgctagttccagacacctccgaagatgg

SEQ ID NO: 305 - RNA, 7323 nt, synthetic construct
  misc_feature 1..7323: note = V53 mRNA
  source 1..7323: mol_type = other RNA
aggactcactatttgttttcgcgcccagttgcaaaaagtgtcgacatttgcttctgacacaactgtgttcactagcaacctcaaacagacaccgccaccatggtccctgctgctaagagagtgaaactggatggatccgacaagaagtacagcatcggcctggccatcggcaccaactctgtgggctgggccgtgatcaccgacgagtacaaggtgcccagcaagaaattcaaggtgctgggcaacaccgaccggcacagcatcaagaagaacctgatcggcgccctgctgttcgacagcggagaaacagccgaggccacccggctgaagagaaccgccagaagaagatacaccagacggaagaaccggatctgctatctgcaagagatcttcagcaacgagatggccaaggtggacgacagcttcttccacagactggaagagtccttcctggtggaagaggataagaagcacgagcggcaccccatcttcggcaacatcgtggacgaggtggcctaccacgagaagtaccccaccatctaccacctgagaaagaaactggtggacagcaccgacaaggccgacctgcggctgatctatctggccctggcccacatgatcaagttccggggccacttcctgatcgagggcgacctgaaccccgacaacagcgacgtggacaagctgttcatccagctggtgcagacctacaaccagctgttcgaggaaaaccccatcaacgccagcggcgtggacgccaaggccatcctgtctgccagactgagcaagagcagacggctggaaaatctgatcgcccagctgcccggcgagaagaagaatggcctgttcggcaacctgattgccctgagcctgggcctgacccccaacttcaagagcaacttcgacctggccgaggatgccaaactgcagctgagcaaggacacctacgacgacgacctggacaacctgctggcccagatcggcgaccagtacgccgacctgtttctggccgccaagaacctgtccgacgccatcctgctgagcgacatcctgagagtgaacaccgagatcaccaaggcccccctgagcgcctctatgatcaagagatacgacgagcaccaccaggacctgaccctgctgaaagctctcgtgcggcagcagctgcctgagaagtacaaagagattttcttcgaccagagcaagaacggctacgccggctacatcgatggcggagccagccaggaagagttctacaagttcatcaagcccatcctggaaaagatggacggcaccgaggaactgctcgtgaagctgaacagagaggacctgctgcggaagcagcggaccttcgacaacggcagcatcccccaccagatccacctgggagagctgcacgccattctgcggcggcaggaagatttttacccattcctgaaggacaaccgggaaaagatcgagaagatcctgaccttccgcatcccctactacgtgggccctctggccaggggaaacagcagattcgcctggatgaccagaaagagcgaggaaaccatcaccccctggaacttcgaggaagtggtggacaagggcgccagcgcccagagcttcatcgagcggatgaccaacttcgataagaacctgcccaacgagaaggtgctgcccaagcacagcctgctgtacgagtacttcaccgtgtacaacgagctgaccaaagtgaaatacgtgaccgagggaatgagaaagcccgccttcctgagcggcgagcagaaaaaagccatcgtggacctgctgttcaagaccaaccggaaagtgaccgtgaagcagctgaaagaggactacttcaagaaaatcgagtgcttcgactccgtggaaatctccggcgtggaagatcggttcaacgcctccctgggcacataccacgatctgctgaaaattatcaaggacaaggacttcctggacaatgaggaaaacgaggacattctggaagatatcgtgctgaccctgacactgtttgaggacagagagatgatcgaggaacggctgaaaacctatgcccacctgttcgacgacaaagtgatgaagcagctgaagcggcggagatacaccggctggggcaggctgagccggaagctgatcaacggcatccgggacaagcagtccggcaagacaatcctggatttcctgaagtccgacggcttcgccaacagaaacttcatgcagctgatccacgacgacagcctgacctttaaagaggacatccagaaagcccaggtgtccggccagggcgatagcctgcacgagcacattgccaatctggccggcagccccgccattaagaagggcatcctgcagacagtgaaggtggtggacgagctcgtgaaagtgatgggccggcacaagcccgagaacatcgtgatcgaaatggccagagagaaccagaccacccagaagggacagaagaacagccgcgagagaatgaagcggatcgaagagggcatcaaagagctgggcagccagatcctgaaagaacaccccgtggaaaacacccagctgcagaacgagaagctgtacctgtactacctgcagaatgggcgggatatgtacgtggaccaggaactggacatcaaccggctgtccgactacgatgtggacgctatcgtgcctcagagctttctgaaggacgactccatcgataacaaagtgctgactcggagcgacaagaaccggggcaagagcgacaacgtgccctccgaagaggtcgtgaagaagatgaagaactactggcgccagctgctgaatgccaagctgattacccagaggaagttcgacaatctgaccaaggccgagagaggcggcctgagcgaactggataaggccggcttcatcaagagacagctggtggaaacccggcagatcacaaagcacgtggcacagatcctggactcccggatgaacactaagtacgacgagaacgacaaactgatccgggaagtgaaagtgatcaccctgaagtccaagctggtgtccgatttccggaaggatttccagttttacaaagtgcgcgagatcaacaactaccaccacgcccacgacgcctacctgaacgccgtcgtgggaaccgccctgatcaaaaagtaccctaagctggaaagcgagttcgtgtacggcgactacaaggtgtacgacgtgcggaagatgatcgccaagagcgagcaggaaatcggcaaggctaccgccaagtacttcttctacagcaacatcatgaactttttcaagaccgagattaccctggccaacggcgagatccggaagcggcctctgatcgagacaaacggcgaaacaggcgagatcgtgtgggataagggccgggactttgccaccgtgcggaaagtgctgtctatgccccaagtgaatatcgtgaaaaagaccgaggtgcagacaggcggcttcagcaaagagtctatcctgcccaagaggaacagcgacaagctgatcgccagaaagaaggactgggaccctaagaagtacggcggcttcgacagccccaccgtggcctattctgtgctggtggtggccaaagtggaaaagggcaagtccaagaaactgaagagtgtgaaagagctgctggggatcaccatcatggaaagaagcagcttcgagaagaatcccatcgactttctggaagccaagggctacaaagaagtgaaaaaggacctgatcatcaagctgcctaagtactccctgttcgagctggaaaacggccggaagagaatgctggcctctgccggcgaactgcagaagggaaacgaactggccctgccctccaaatatgtgaacttcctgtacctggccagccactatgagaagctgaagggctcccccgaggataatgagcagaaacagctgtttgtggaacagcacaaacactacctggacgagatcatcgagcagatcagcgagttctccaagagagtgatcctggccgacgctaatctggacaaggtgctgagcgcctacaacaagcacagagacaagcctatcagagagcaggccgagaatatcatccacctgtttaccctgaccaatctgggagcccctgccgccttcaagtactttgacaccaccatcgaccggaagaggtacaccagcaccaaagaggtgctggacgccaccctgatccaccagagcatcaccggcctgtacgagacacggatcgacctgtctcagctgggaggcgacgcctatccctatgacgtgcccgattatgccagcctgggcagcggctcccccaagaaaaaacgcaaggtggaagatcctaagaaaaagcggaaagtggacggcggagggccgagctctggcgcacccccaccaagtggagggtctcctgccgggtccccaacatctactgaagaaggcaccagcgaatccgcaacgcccgagtcaggccctggtacctccacagaaccatctgaaggtagtgcgcctggttccccagctggaagccctacttccaccgaagaaggcacgtcaaccgaaccaagtgaaggatctgcccctgggaccagcactgaaccatctgagatgaacaattcccagggaagagtgaccttcgaggacgtgaccgtgaacttcacccaaggcgagtggcagagactgaaccccgagcagagaaacctgtaccgggacgtgatgctggaaaactacagcaacctggtgtccgtcggccagggcgagacaacaaagcctgacgtgatcctgcggctggaacagggcaaagagccttggctggaagaggaagaggtgctcggatctggcagagccgagaagaatggcgatatcggcggacagatctggaagccaaaggatgtgaaagagagtctcagcggcagcgagacccccggtaccagcgagagcgctacacccgaatccggccccggcagccccgccggcagccctacaagcaccgaggagggcacctccgaatccgccacccctgagagcggacccggcagcgagcctgccacaagcggcagcgagacacctggaacaagcgagagcgccacacctgaaagcggccccggaacatccaccgagcctagcgagggcagcgcccctggcacaagcacagagccttccgagagcgccacccccgagagcatgggccctatggagatatacaagacagtgtctgcatggaagagacagccagtgcgggtactgagcctcttcagaaacatcgacaaggtactaaagagtttgggcttcttggaaagcggttctggttctgggggaggaacgctgaagtacgtggaagatgtcacaaatgtcgtgaggagagacgtggagaaatggggcccctttgacctggtgtacggctcgacgcagcccctaggcagctcttgtgatcgctgtcccggctggtacatgttccagttccaccggatcctgcagtatgcgctgcctcgccaggagagtcagcggcccttcttctggatattcatggacaatctgctgctgactgaggatgaccaagagacaactacccgcttccttcagacagaggctgtgaccctccaggatgtccgtggcagagactaccagaatgctatgcgggtgtggagcaacattccagggctgaagagcaagcatgcgcccctgaccccaaaggaagaagagtatctgcaagcccaagtcagaagcaggagcaagctggacgccccgaaagttgacctcctggtgaagaactgccttctcccgctgagagagtacttcaagtatttttctcaaaactcacttcctctttctagcggcaatagtaacgctaacagccgcgggccgagcttcagcagcggcctggtgccgttaagcttgcgcggcagccatatgaaccatgaccaggaatttgaccccccaaaggtttacccacctgtgccagctgagaagaggaagcccatccgcgtgctgtctctctttgatgggattgctacagggctcctggtgctgaaggacctgggcatccaagtggaccgctacattgcctccgaggtgtgtgaggactccatcacggtgggcatggtgcggcaccagggaaagatcatgtacgtcggggacgtccgcagcgtcacacagaagcatatccaggagtggggcccattcgacctggtgattggaggcagtccctgcaatgacctctccattgtcaaccctgcccgcaagggactttatgagggtactggccgcctcttctttgagttctaccgcctcctgcatgatgcgcggcccaaggagggagatgatcgccccttcttctggctctttgagaatgtggtggccatgggcgttagtgacaagagggacatctcgcgatttcttgagtctaaccccgtgatgattgacgccaaagaagtgtctgctgcacacagggcccgttacttctggggtaaccttcctggcatgaacaggcctttggcatccactgtgaatgataagctggagctgcaagagtgtctggagcacggcagaatagccaagttcagcaaagtgaggaccattaccaccaggtcaaactctataaagcagggcaaagaccagcatttccccgtcttcatgaacgagaaggaggacatcctgtggtgcactgaaatggaaagggtgtttggcttccccgtccactacacagacgtctccaacatgagccgcttggcgaggcagagactgctgggccgatcgtggagcgtgccggtcatccgccacctcttcgctccgctgaaggaatattttgcttgtgtggacggcagcggcagcgagacccccggtaccagcgagagcgccacccccgagagccggacactggtgaccttcaaggatgtatttgtggacttcaccagggaggagtggaagctgctggacactgctcagcagatcgtgtacagaaatgtgatgctggagaactataagaacctggtttccttgggttatcagcttactaagccagatgtgatcctccggttggagaagggagaagagccctgagatcccaagcacgcagcaatgcagctcaaaacgcttagcctagccacacccccacgggaaacagcagtgattaacctttagcaataaacgaaagtttaactaagctatactaaccccagggttggtcaatttcgtgccagccacaccctggtactgcatgcacgcaatgctagctgcccctttcccgtcctgggcaccccgagtctcccccgaccccgggtcccaggtatgctcccacctccacctgccccactcaccacctctgctagttccagacacctccgaagatgg

SEQ ID NO: 306 - RNA, 7278 nt, synthetic construct
  misc_feature 1..7278: note = V54 mRNA
  source 1..7278: mol_type = other RNA
aggactcactatttgttttcgcgcccagttgcaaaaagtgtcgacatttgcttctgacacaactgtgttcactagcaacctcaaacagacaccttaatgccaccatggtgcggacactggtgaccttcaaggatgtatttgtggacttcaccagggaggagtggaagctgctggacactgctcagcagatcgtgtacagaaatgtgatgctggagaactataagaacctggtttccttgggttatcagcttactaagccagatgtgatcctccggttggagaagggagaagagcccggagggccgagctctggcgcacccccaccaagtggagggtctcctgccgggtccccaacatctactgaagaaggcaccagcgaatccgcaacgcccgagtcaggccctggtacctccacagaaccatctgaaggtagtgcgcctggttccccagctggaagccctacttccaccgaagaaggcacgtcaaccgaaccaagtgaaggatctgcccctgggaccagcactgaaccatctgagccaaaaaagaagagaaaggtaatgaaccatgaccaggaatttgaccccccaaaggtttacccacctgtgccagctgagaagaggaagcccatccgcgtgctgtctctctttgatgggattgctacagggctcctggtgctgaaggacctgggcatccaagtggaccgctacattgcctccgaggtgtgtgaggactccatcacggtgggcatggtgcggcaccagggaaagatcatgtacgtcggggacgtccgcagcgtcacacagaagcatatccaggagtggggcccattcgacctggtgattggaggcagtccctgcaatgacctctccattgtcaaccctgcccgcaagggactttatgagggtactggccgcctcttctttgagttctaccgcctcctgcatgatgcgcggcccaaggagggagatgatcgccccttcttctggctctttgagaatgtggtggccatgggcgttagtgacaagagggacatctcgcgatttcttgagtctaaccccgtgatgattgacgccaaagaagtgtctgctgcacacagggcccgttacttctggggtaaccttcctggcatgaacaggcctttggcatccactgtgaatgataagctggagctgcaagagtgtctggagcacggcagaatagccaagttcagcaaagtgaggaccattaccaccaggtcaaactctataaagcagggcaaagaccagcatttccccgtcttcatgaacgagaaggaggacatcctgtggtgcactgaaatggaaagggtgtttggcttccccgtccactacacagacgtctccaacatgagccgcttggcgaggcagagactgctgggccgatcgtggagcgtgccggtcatccgccacctcttcgctccgctgaaggaatattttgcttgtgtgtctagcggcaatagtaacgctaacagccgcgggccgagcttcagcagcggcctggtgccgttaagcttgcgcggcagccatatgttcgaaaccgtgcctgtgtggaggagacagccagtccgggtgctgtccctttttgaagacatcaagaaagagctgacgagtttgggctttttggaaagtggttctgacccgggacaactgaagcatgtggttgatgtcacagacacagtgaggaaggatgtggaggagtggggacccttcgatcttgtgtacggcgccacacctcccctgggccacacctgtgaccgtcctcccagctggtacctgttccagttccaccggctcctgcagtacgcacggcccaagccaggcagccccaggcccttcttctggatgttcgtggacaatctggtgctgaacaaggaagacctggacgtcgcatctcgcttcctggagatggagccagtcaccatcccagatgtccacggcggatccttgcagaatgctgtccgcgtgtggagcaacatcccagccataaggagcagcaggcactgggctctggtttcggaagaagaattgtccctgctggcccagaacaagcagagctcgaagctcgcggccaagtggcccaccaagctggtgaagaactgctttctccccctaagagaatatttcaagtatttttcagacggcagcggcagcgagacccccggtaccagcgagagcgccacccccgagagcatgaacaattcccagggaagagtgaccttcgaggatgtcactgtgaacttcacccagggggagtggcagcggctgaatcccgaacagagaaacttgtacagggatgtgatgctggagaattacagcaaccttgtctctgtgggacaaggggaaaccaccaaacccgatgtgatcttgaggttggaacaaggaaaggagccatggttggaggaagaggaagtgctgggaagtggccgtgcagaaaaaaatggggacattggagggcagatttggaagccaaaggatgtgaaagagagtctcggagggccgagctctggcgcacccccaccaagtggagggtctcctgccgggtccccaacatctactgaagaaggcaccagcgaatccgcaacgcccgagtcaggccctggtacctccacagaaccatctgaaggtagtgcgcctggttccccagctggaagccctacttccaccgaagaaggcacgtcaaccgaaccaagtgaaggatctgcccctgggaccagcactgaaccatctgagccaaaaaagaagagaaaggtaatggacaagaagtacagcatcggcctggccatcggcaccaactctgtgggctgggccgtgatcaccgacgagtacaaggtgcccagcaagaaattcaaggtgctgggcaacaccgaccggcacagcatcaagaagaacctgatcggcgccctgctgttcgacagcggagaaacagccgaggccacccggctgaagagaaccgccagaagaagatacaccagacggaagaaccggatctgctatctgcaagagatcttcagcaacgagatggccaaggtggacgacagcttcttccacagactggaagagtccttcctggtggaagaggataagaagcacgagcggcaccccatcttcggcaacatcgtggacgaggtggcctaccacgagaagtaccccaccatctaccacctgagaaagaaactggtggacagcaccgacaaggccgacctgcggctgatctatctggccctggcccacatgatcaagttccggggccacttcctgatcgagggcgacctgaaccccgacaacagcgacgtggacaagctgttcatccagctggtgcagacctacaaccagctgttcgaggaaaaccccatcaacgccagcggcgtggacgccaaggccatcctgtctgccagactgagcaagagcagacggctggaaaatctgatcgcccagctgcccggcgagaagaagaatggcctgttcggcaacctgattgccctgagcctgggcctgacccccaacttcaagagcaacttcgacctggccgaggatgccaaactgcagctgagcaaggacacctacgacgacgacctggacaacctgctggcccagatcggcgaccagtacgccgacctgtttctggccgccaagaacctgtccgacgccatcctgctgagcgacatcctgagagtgaacaccgagatcaccaaggcccccctgagcgcctctatgatcaagagatacgacgagcaccaccaggacctgaccctgctgaaagctctcgtgcggcagcagctgcctgagaagtacaaagagattttcttcgaccagagcaagaacggctacgccggctacatcgatggcggagccagccaggaagagttctacaagttcatcaagcccatcctggaaaagatggacggcaccgaggaactgctcgtgaagctgaacagagaggacctgctgcggaagcagcggaccttcgacaacggcagcatcccccaccagatccacctgggagagctgcacgccattctgcggcggcaggaagatttttacccattcctgaaggacaaccgggaaaagatcgagaagatcctgaccttccgcatcccctactacgtgggccctctggccaggggaaacagcagattcgcctggatgaccagaaagagcgaggaaaccatcaccccctggaacttcgaggaagtggtggacaagggcgccagcgcccagagcttcatcgagcggatgaccaacttcgataagaacctgcccaacgagaaggtgctgcccaagcacagcctgctgtacgagtacttcaccgtgtacaacgagctgaccaaagtgaaatacgtgaccgagggaatgagaaagcccgccttcctgagcggcgagcagaaaaaagccatcgtggacctgctgttcaagaccaaccggaaagtgaccgtgaagcagctgaaagaggactacttcaagaaaatcgagtgcttcgactccgtggaaatctccggcgtggaagatcggttcaacgcctccctgggcacataccacgatctgctgaaaattatcaaggacaaggacttcctggacaatgaggaaaacgaggacattctggaagatatcgtgctgaccctgacactgtttgaggacagagagatgatcgaggaacggctgaaaacctatgcccacctgttcgacgacaaagtgatgaagcagctgaagcggcggagatacaccggctggggcaggctgagccggaagctgatcaacggcatccgggacaagcagtccggcaagacaatcctggatttcctgaagtccgacggcttcgccaacagaaacttcatgcagctgatccacgacgacagcctgacctttaaagaggacatccagaaagcccaggtgtccggccagggcgatagcctgcacgagcacattgccaatctggccggcagccccgccattaagaagggcatcctgcagacagtgaaggtggtggacgagctcgtgaaagtgatgggccggcacaagcccgagaacatcgtgatcgaaatggccagagagaaccagaccacccagaagggacagaagaacagccgcgagagaatgaagcggatcgaagagggcatcaaagagctgggcagccagatcctgaaagaacaccccgtggaaaacacccagctgcagaacgagaagctgtacctgtactacctgcagaatgggcgggatatgtacgtggaccaggaactggacatcaaccggctgtccgactacgatgtggacgctatcgtgcctcagagctttctgaaggacgactccatcgataacaaagtgctgactcggagcgacaagaaccggggcaagagcgacaacgtgccctccgaagaggtcgtgaagaagatgaagaactactggcgccagctgctgaatgccaagctgattacccagaggaagttcgacaatctgaccaaggccgagagaggcggcctgagcgaactggataaggccggcttcatcaagagacagctggtggaaacccggcagatcacaaagcacgtggcacagatcctggactcccggatgaacactaagtacgacgagaacgacaaactgatccgggaagtgaaagtgatcaccctgaagtccaagctggtgtccgatttccggaaggatttccagttttacaaagtgcgcgagatcaacaactaccaccacgcccacgacgcctacctgaacgccgtcgtgggaaccgccctgatcaaaaagtaccctaagctggaaagcgagttcgtgtacggcgactacaaggtgtacgacgtgcggaagatgatcgccaagagcgagcaggaaatcggcaaggctaccgccaagtacttcttctacagcaacatcatgaactttttcaagaccgagattaccctggccaacggcgagatccggaagcggcctctgatcgagacaaacggcgaaacaggcgagatcgtgtgggataagggccgggactttgccaccgtgcggaaagtgctgtctatgccccaagtgaatatcgtgaaaaagaccgaggtgcagacaggcggcttcagcaaagagtctatcctgcccaagaggaacagcgacaagctgatcgccagaaagaaggactgggaccctaagaagtacggcggcttcgacagccccaccgtggcctattctgtgctggtggtggccaaagtggaaaagggcaagtccaagaaactgaagagtgtgaaagagctgctggggatcaccatcatggaaagaagcagcttcgagaagaatcccatcgactttctggaagccaagggctacaaagaagtgaaaaaggacctgatcatcaagctgcctaagtactccctgttcgagctggaaaacggccggaagagaatgctggcctctgccggcgaactgcagaagggaaacgaactggccctgccctccaaatatgtgaacttcctgtacctggccagccactatgagaagctgaagggctcccccgaggataatgagcagaaacagctgtttgtggaacagcacaaacactacctggacgagatcatcgagcagatcagcgagttctccaagagagtgatcctggccgacgctaatctggacaaggtgctgagcgcctacaacaagcacagagacaagcctatcagagagcaggccgagaatatcatccacctgtttaccctgaccaatctgggagcccctgccgccttcaagtactttgacaccaccatcgaccggaagaggtacaccagcaccaaagaggtgctggacgccaccctgatccaccagagcatcaccggcctgtacgagacacggatcgacctgtctcagctgggaggcgacgcctatccctatgacgtgcccgattatgccagcctgggcagcggctcccccaagaaaaaacgcaaggtggaagatcctaagaaaaagcggaaagtggacggcctcgagtaatgagatcccaagcacgcagcaatgcagctcaaaacgcttagcctagccacacccccacgggaaacagcagtgattaacctttagcaataaacgaaagtttaactaagctatactaaccccagggttggtcaatttcgtgccagccacaccctggtactgcatgcacgcaatgctagctgcccctttcccgtcctgggcaccccgagtctcccccgaccccgggtcccaggtatgctcccacctccacctgccccactcaccacctctgctagttccagacacctccgagacgagg

SEQ ID NO: 307 - RNA, 7269 nt, synthetic construct
  misc_feature 1..7269: note = V55 mRNA
  source 1..7269: mol_type = other RNA
aggactcactatttgttttcgcgcccagttgcaaaaagtgtcgacatttgcttctgacacaactgtgttcactagcaacctcaaacagacaccttaatgccaccatggtgcggacactggtgaccttcaaggatgtatttgtggacttcaccagggaggagtggaagctgctggacactgctcagcagatcgtgtacagaaatgtgatgctggagaactataagaacctggtttccttgggttatcagcttactaagccagatgtgatcctccggttggagaagggagaagagcccggagggccgagctctggcgcacccccaccaagtggagggtctcctgccgggtccccaacatctactgaagaaggcaccagcgaatccgcaacgcccgagtcaggccctggtacctccacagaaccatctgaaggtagtgcgcctggttccccagctggaagccctacttccaccgaagaaggcacgtcaaccgaaccaagtgaaggatctgcccctgggaccagcactgaaccatctgagccaaaaaagaagagaaaggtaaacaattcccagggaagagtgaccttcgaggatgtcactgtgaacttcacccagggggagtggcagcggctgaatcccgaacagagaaacttgtacagggatgtgatgctggagaattacagcaaccttgtctctgtgggacaaggggaaaccaccaaacccgatgtgatcttgaggttggaacaaggaaaggagccatggttggaggaagaggaagtgctgggaagtggccgtgcagaaaaaaatggggacattggagggcagatttggaagccaaaggatgtgaaagagagtctcagcggcagcgagacccccggtaccagcgagagcgccacccccgagagcatgaaccatgaccaggaatttgaccccccaaaggtttacccacctgtgccagctgagaagaggaagcccatccgcgtgctgtctctctttgatgggattgctacagggctcctggtgctgaaggacctgggcatccaagtggaccgctacattgcctccgaggtgtgtgaggactccatcacggtgggcatggtgcggcaccagggaaagatcatgtacgtcggggacgtccgcagcgtcacacagaagcatatccaggagtggggcccattcgacctggtgattggaggcagtccctgcaatgacctctccattgtcaaccctgcccgcaagggactttatgagggtactggccgcctcttctttgagttctaccgcctcctgcatgatgcgcggcccaaggagggagatgatcgccccttcttctggctctttgagaatgtggtggccatgggcgttagtgacaagagggacatctcgcgatttcttgagtctaaccccgtgatgattgacgccaaagaagtgtctgctgcacacagggcccgttacttctggggtaaccttcctggcatgaacaggcctttggcatccactgtgaatgataagctggagctgcaagagtgtctggagcacggcagaatagccaagttcagcaaagtgaggaccattaccaccaggtcaaactctataaagcagggcaaagaccagcatttccccgtcttcatgaacgagaaggaggacatcctgtggtgcactgaaatggaaagggtgtttggcttccccgtccactacacagacgtctccaacatgagccgcttggcgaggcagagactgctgggccgatcgtggagcgtgccggtcatccgccacctcttcgctccgctgaaggaatattttgcttgtgtgtctagcggcaatagtaacgctaacagccgcgggccgagcttcagcagcggcctggtgccgttaagcttgcgcggcagccatatgttcgaaaccgtgcctgtgtggaggagacagccagtccgggtgctgtccctttttgaagacatcaagaaagagctgacgagtttgggctttttggaaagtggttctgacccgggacaactgaagcatgtggttgatgtcacagacacagtgaggaaggatgtggaggagtggggacccttcgatcttgtgtacggcgccacacctcccctgggccacacctgtgaccgtcctcccagctggtacctgttccagttccaccggctcctgcagtacgcacggcccaagccaggcagccccaggcccttcttctggatgttcgtggacaatctggtgctgaacaaggaagacctggacgtcgcatctcgcttcctggagatggagccagtcaccatcccagatgtccacggcggatccttgcagaatgctgtccgcgtgtggagcaacatcccagccataaggagcagcaggcactgggctctggtttcggaagaagaattgtccctgctggcccagaacaagcagagctcgaagctcgcggccaagtggcccaccaagctggtgaagaactgctttctccccctaagagaatatttcaagtatttttcaggagggccgagctctggcgcacccccaccaagtggagggtctcctgccgggtccccaacatctactgaagaaggcaccagcgaatccgcaacgcccgagtcaggccctggtacctccacagaaccatctgaaggtagtgcgcctggttccccagctggaagccctacttccaccgaagaaggcacgtcaaccgaaccaagtgaaggatctgcccctgggaccagcactgaaccatctgagccaaaaaagaagagaaaggtaatggacaagaagtacagcatcggcctggccatcggcaccaactctgtgggctgggccgtgatcaccgacgagtacaaggtgcccagcaagaaattcaaggtgctgggcaacaccgaccggcacagcatcaagaagaacctgatcggcgccctgctgttcgacagcggagaaacagccgaggccacccggctgaagagaaccgccagaagaagatacaccagacggaagaaccggatctgctatctgcaagagatcttcagcaacgagatggccaaggtggacgacagcttcttccacagactggaagagtccttcctggtggaagaggataagaagcacgagcggcaccccatcttcggcaacatcgtggacgaggtggcctaccacgagaagtaccccaccatctaccacctgagaaagaaactggtggacagcaccgacaaggccgacctgcggctgatctatctggccctggcccacatgatcaagttccggggccacttcctgatcgagggcgacctgaaccccgacaacagcgacgtggacaagctgttcatccagctggtgcagacctacaaccagctgttcgaggaaaaccccatcaacgccagcggcgtggacgccaaggccatcctgtctgccagactgagcaagagcagacggctggaaaatctgatcgcccagctgcccggcgagaagaagaatggcctgttcggcaacctgattgccctgagcctgggcctgacccccaacttcaagagcaacttcgacctggccgaggatgccaaactgcagctgagcaaggacacctacgacgacgacctggacaacctgctggcccagatcggcgaccagtacgccgacctgtttctggccgccaagaacctgtccgacgccatcctgctgagcgacatcctgagagtgaacaccgagatcaccaaggcccccctgagcgcctctatgatcaagagatacgacgagcaccaccaggacctgaccctgctgaaagctctcgtgcggcagcagctgcctgagaagtacaaagagattttcttcgaccagagcaagaacggctacgccggctacatcgatggcggagccagccaggaagagttctacaagttcatcaagcccatcctggaaaagatggacggcaccgaggaactgctcgtgaagctgaacagagaggacctgctgcggaagcagcggaccttcgacaacggcagcatcccccaccagatccacctgggagagctgcacgccattctgcggcggcaggaagatttttacccattcctgaaggacaaccgggaaaagatcgagaagatcctgaccttccgcatcccctactacgtgggccctctggccaggggaaacagcagattcgcctggatgaccagaaagagcgaggaaaccatcaccccctggaacttcgaggaagtggtggacaagggcgccagcgcccagagcttcatcgagcggatgaccaacttcgataagaacctgcccaacgagaaggtgctgcccaagcacagcctgctgtacgagtacttcaccgtgtacaacgagctgaccaaagtgaaatacgtgaccgagggaatgagaaagcccgccttcctgagcggcgagcagaaaaaagccatcgtggacctgctgttcaagaccaaccggaaagtgaccgtgaagcagctgaaagaggactacttcaagaaaatcgagtgcttcgactccgtggaaatctccggcgtggaagatcggttcaacgcctccctgggcacataccacgatctgctgaaaattatcaaggacaaggacttcctggacaatgaggaaaacgaggacattctggaagatatcgtgctgaccctgacactgtttgaggacagagagatgatcgaggaacggctgaaaacctatgcccacctgttcgacgacaaagtgatgaagcagctgaagcggcggagatacaccggctggggcaggctgagccggaagctgatcaacggcatccgggacaagcagtccggcaagacaatcctggatttcctgaagtccgacggcttcgccaacagaaacttcatgcagctgatccacgacgacagcctgacctttaaagaggacatccagaaagcccaggtgtccggccagggcgatagcctgcacgagcacattgccaatctggccggcagccccgccattaagaagggcatcctgcagacagtgaaggtggtggacgagctcgtgaaagtgatgggccggcacaagcccgagaacatcgtgatcgaaatggccagagagaaccagaccacccagaagggacagaagaacagccgcgagagaatgaagcggatcgaagagggcatcaaagagctgggcagccagatcctgaaagaacaccccgtggaaaacacccagctgcagaacgagaagctgtacctgtactacctgcagaatgggcgggatatgtacgtggaccaggaactggacatcaaccggctgtccgactacgatgtggacgctatcgtgcctcagagctttctgaaggacgactccatcgataacaaagtgctgactcggagcgacaagaaccggggcaagagcgacaacgtgccctccgaagaggtcgtgaagaagatgaagaactactggcgccagctgctgaatgccaagctgattacccagaggaagttcgacaatctgaccaaggccgagagaggcggcctgagcgaactggataaggccggcttcatcaagagacagctggtggaaacccggcagatcacaaagcacgtggcacagatcctggactcccggatgaacactaagtacgacgagaacgacaaactgatccgggaagtgaaagtgatcaccctgaagtccaagctggtgtccgatttccggaaggatttccagttttacaaagtgcgcgagatcaacaactaccaccacgcccacgacgcctacctgaacgccgtcgtgggaaccgccctgatcaaaaagtaccctaagctggaaagcgagttcgtgtacggcgactacaaggtgtacgacgtgcggaagatgatcgccaagagcgagcaggaaatcggcaaggctaccgccaagtacttcttctacagcaacatcatgaactttttcaagaccgagattaccctggccaacggcgagatccggaagcggcctctgatcgagacaaacggcgaaacaggcgagatcgtgtgggataagggccgggactttgccaccgtgcggaaagtgctgtctatgccccaagtgaatatcgtgaaaaagaccgaggtgcagacaggcggcttcagcaaagagtctatcctgcccaagaggaacagcgacaagctgatcgccagaaagaaggactgggaccctaagaagtacggcggcttcgacagccccaccgtggcctattctgtgctggtggtggccaaagtggaaaagggcaagtccaagaaactgaagagtgtgaaagagctgctggggatcaccatcatggaaagaagcagcttcgagaagaatcccatcgactttctggaagccaagggctacaaagaagtgaaaaaggacctgatcatcaagctgcctaagtactccctgttcgagctggaaaacggccggaagagaatgctggcctctgccggcgaactgcagaagggaaacgaactggccctgccctccaaatatgtgaacttcctgtacctggccagccactatgagaagctgaagggctcccccgaggataatgagcagaaacagctgtttgtggaacagcacaaacactacctggacgagatcatcgagcagatcagcgagttctccaagagagtgatcctggccgacgctaatctggacaaggtgctgagcgcctacaacaagcacagagacaagcctatcagagagcaggccgagaatatcatccacctgtttaccctgaccaatctgggagcccctgccgccttcaagtactttgacaccaccatcgaccggaagaggtacaccagcaccaaagaggtgctggacgccaccctgatccaccagagcatcaccggcctgtacgagacacggatcgacctgtctcagctgggaggcgacgcctatccctatgacgtgcccgattatgccagcctgggcagcggctcccccaagaaaaaacgcaaggtggaagatcctaagaaaaagcggaaagtggacggcctcgagtaatgagatcccaagcacgcagcaatgcagctcaaaacgcttagcctagccacacccccacgggaaacagcagtgattaacctttagcaataaacgaaagtttaactaagctatactaaccccagggttggtcaatttcgtgccagccacaccctggtactgcatgcacgcaatgctagctgcccctttcccgtcctgggcaccccgagtctcccccgaccccgggtcccaggtatgctcccacctccacctgccccactcaccacctctgctagttccagacacctccgagacgagg

SEQ ID NO: 308 - RNA, 7473 nt, synthetic construct
  misc_feature 1..7473: note = V56 mRNA
  source 1..7473: mol_type = other RNA
aggactcactatttgttttcgcgcccagttgcaaaaagtgtcgacatttgcttctgacacaactgtgttcactagcaacctcaaacagacaccttaattaatctagaaccggtccagccaccatgaaccatgaccaggaatttgaccccccaaaggtttacccacctgtgccagctgagaagaggaagcccatccgcgtgctgtctctctttgatgggattgctacagggctcctggtgctgaaggacctgggcatccaagtggaccgctacattgcctccgaggtgtgtgaggactccatcacggtgggcatggtgcggcaccagggaaagatcatgtacgtcggggacgtccgcagcgtcacacagaagcatatccaggagtggggcccattcgacctggtgattggaggcagtccctgcaatgacctctccattgtcaaccctgcccgcaagggactttatgagggtactggccgcctcttctttgagttctaccgcctcctgcatgatgcgcggcccaaggagggagatgatcgccccttcttctggctctttgagaatgtggtggccatgggcgttagtgacaagagggacatctcgcgatttcttgagtctaaccccgtgatgattgacgccaaagaagtgtctgctgcacacagggcccgttacttctggggtaaccttcctggcatgaacaggcctttggcatccactgtgaatgataagctggagctgcaagagtgtctggagcacggcagaatagccaagttcagcaaagtgaggaccattaccaccaggtcaaactctataaagcagggcaaagaccagcatttccccgtcttcatgaacgagaaggaggacatcctgtggtgcactgaaatggaaagggtgtttggcttccccgtccactacacagacgtctccaacatgagccgcttggcgaggcagagactgctgggccgatcgtggagcgtgccggtcatccgccacctcttcgctccgctgaaggaatattttgcttgtgtgtctagcggcaatagtaacgctaacagccgcgggccgagcttcagcagcggcctggtgccgttaagcttgcgcggcagccatatgttcgaaaccgtgcctgtgtggaggagacagccagtccgggtgctgtccctttttgaagacatcaagaaagagctgacgagtttgggctttttggaaagtggttctgacccgggacaactgaagcatgtggttgatgtcacagacacagtgaggaaggatgtggaggagtggggacccttcgatcttgtgtacggcgccacacctcccctgggccacacctgtgaccgtcctcccagctggtacctgttccagttccaccggctcctgcagtacgcacggcccaagccaggcagccccaggcccttcttctggatgttcgtggacaatctggtgctgaacaaggaagacctggacgtcgcatctcgcttcctggagatggagccagtcaccatcccagatgtccacggcggatccttgcagaatgctgtccgcgtgtggagcaacatcccagccataaggagcagcaggcactgggctctggtttcggaagaagaattgtccctgctggcccagaacaagcagagctcgaagctcgcggccaagtggcccaccaagctggtgaagaactgctttctccccctaagagaatatttcaagtatttttcaggagggccgagctctggcgcacccccaccaagtggagggtctcctgccgggtccccaacatctactgaagaaggcaccagcgaatccgcaacgcccgagtcaggccctggtacctccacagaaccatctgaaggtagtgcgcctggttccccagctggaagccctacttccaccgaagaaggcacgtcaaccgaaccaagtgaaggatctgcccctgggaccagcactgaaccatctgagcggacactggtgaccttcaaggatgtatttgtggacttcaccagggaggagtggaagctgctggacactgctcagcagatcgtgtacagaaatgtgatgctggagaactataagaacctggtttccttgggttatcagcttactaagccagatgtgatcctccggttggagaagggagaagagcccggagggccgagctctggcgcacccccaccaagtggagggtctcctgccgggtccccaacatctactgaagaaggcaccagcgaatccgcaacgcccgagtcaggccctggtacctccacagaaccatctgaaggtagtgcgcctggttccccagctggaagccctacttccaccgaagaaggcacgtcaaccgaaccaagtgaaggatctgcccctgggaccagcactgaaccatctgagccaaaaaagaagagaaaggtaaacaattcccagggaagagtgaccttcgaggatgtcactgtgaacttcacccagggggagtggcagcggctgaatcccgaacagagaaacttgtacagggatgtgatgctggagaattacagcaaccttgtctctgtgggacaaggggaaaccaccaaacccgatgtgatcttgaggttggaacaaggaaaggagccatggttggaggaagaggaagtgctgggaagtggccgtgcagaaaaaaatggggacattggagggcagatttggaagccaaaggatgtgaaagagagtctcggagggccgagctctggcgcacccccaccaagtggagggtctcctgccgggtccccaacatctactgaagaaggcaccagcgaatccgcaacgcccgagtcaggccctggtacctccacagaaccatctgaaggtagtgcgcctggttccccagctggaagccctacttccaccgaagaaggcacgtcaaccgaaccaagtgaaggatctgcccctgggaccagcactgaaccatctgagccaaaaaagaagagaaaggtaatggacaagaagtacagcatcggcctggccatcggcaccaactctgtgggctgggccgtgatcaccgacgagtacaaggtgcccagcaagaaattcaaggtgctgggcaacaccgaccggcacagcatcaagaagaacctgatcggcgccctgctgttcgacagcggagaaacagccgaggccacccggctgaagagaaccgccagaagaagatacaccagacggaagaaccggatctgctatctgcaagagatcttcagcaacgagatggccaaggtggacgacagcttcttccacagactggaagagtccttcctggtggaagaggataagaagcacgagcggcaccccatcttcggcaacatcgtggacgaggtggcctaccacgagaagtaccccaccatctaccacctgagaaagaaactggtggacagcaccgacaaggccgacctgcggctgatctatctggccctggcccacatgatcaagttccggggccacttcctgatcgagggcgacctgaaccccgacaacagcgacgtggacaagctgttcatccagctggtgcagacctacaaccagctgttcgaggaaaaccccatcaacgccagcggcgtggacgccaaggccatcctgtctgccagactgagcaagagcagacggctggaaaatctgatcgcccagctgcccggcgagaagaagaatggcctgttcggcaacctgattgccctgagcctgggcctgacccccaacttcaagagcaacttcgacctggccgaggatgccaaactgcagctgagcaaggacacctacgacgacgacctggacaacctgctggcccagatcggcgaccagtacgccgacctgtttctggccgccaagaacctgtccgacgccatcctgctgagcgacatcctgagagtgaacaccgagatcaccaaggcccccctgagcgcctctatgatcaagagatacgacgagcaccaccaggacctgaccctgctgaaagctctcgtgcggcagcagctgcctgagaagtacaaagagattttcttcgaccagagcaagaacggctacgccggctacatcgatggcggagccagccaggaagagttctacaagttcatcaagcccatcctggaaaagatggacggcaccgaggaactgctcgtgaagctgaacagagaggacctgctgcggaagcagcggaccttcgacaacggcagcatcccccaccagatccacctgggagagctgcacgccattctgcggcggcaggaagatttttacccattcctgaaggacaaccgggaaaagatcgagaagatcctgaccttccgcatcccctactacgtgggccctctggccaggggaaacagcagattcgcctggatgaccagaaagagcgaggaaaccatcaccccctggaacttcgaggaagtggtggacaagggcgccagcgcccagagcttcatcgagcggatgaccaacttcgataagaacctgcccaacgagaaggtgctgcccaagcacagcctgctgtacgagtacttcaccgtgtacaacgagctgaccaaagtgaaatacgtgaccgagggaatgagaaagcccgccttcctgagcggcgagcagaaaaaagccatcgtggacctgctgttcaagaccaaccggaaagtgaccgtgaagcagctgaaagaggactacttcaagaaaatcgagtgcttcgactccgtggaaatctccggcgtggaagatcggttcaacgcctccctgggcacataccacgatctgctgaaaattatcaaggacaaggacttcctggacaatgaggaaaacgaggacattctggaagatatcgtgctgaccctgacactgtttgaggacagagagatgatcgaggaacggctgaaaacctatgcccacctgttcgacgacaaagtgatgaagcagctgaagcggcggagatacaccggctggggcaggctgagccggaagctgatcaacggcatccgggacaagcagtccggcaagacaatcctggatttcctgaagtccgacggcttcgccaacagaaacttcatgcagctgatccacgacgacagcctgacctttaaagaggacatccagaaagcccaggtgtccggccagggcgatagcctgcacgagcacattgccaatctggccggcagccccgccattaagaagggcatcctgcagacagtgaaggtggtggacgagctcgtgaaagtgatgggccggcacaagcccgagaacatcgtgatcgaaatggccagagagaaccagaccacccagaagggacagaagaacagccgcgagagaatgaagcggatcgaagagggcatcaaagagctgggcagccagatcctgaaagaacaccccgtggaaaacacccagctgcagaacgagaagctgtacctgtactacctgcagaatgggcgggatatgtacgtggaccaggaactggacatcaaccggctgtccgactacgatgtggacgctatcgtgcctcagagctttctgaaggacgactccatcgataacaaagtgctgactcggagcgacaagaaccggggcaagagcgacaacgtgccctccgaagaggtcgtgaagaagatgaagaactactggcgccagctgctgaatgccaagctgattacccagaggaagttcgacaatctgaccaaggccgagagaggcggcctgagcgaactggataaggccggcttcatcaagagacagctggtggaaacccggcagatcacaaagcacgtggcacagatcctggactcccggatgaacactaagtacgacgagaacgacaaactgatccgggaagtgaaagtgatcaccctgaagtccaagctggtgtccgatttccggaaggatttccagttttacaaagtgcgcgagatcaacaactaccaccacgcccacgacgcctacctgaacgccgtcgtgggaaccgccctgatcaaaaagtaccctaagctggaaagcgagttcgtgtacggcgactacaaggtgtacgacgtgcggaagatgatcgccaagagcgagcaggaaatcggcaaggctaccgccaagtacttcttctacagcaacatcatgaactttttcaagaccgagattaccctggccaacggcgagatccggaagcggcctctgatcgagacaaacggcgaaacaggcgagatcgtgtgggataagggccgggactttgccaccgtgcggaaagtgctgtctatgccccaagtgaatatcgtgaaaaagaccgaggtgcagacaggcggcttcagcaaagagtctatcctgcccaagaggaacagcgacaagctgatcgccagaaagaaggactgggaccctaagaagtacggcggcttcgacagccccaccgtggcctattctgtgctggtggtggccaaagtggaaaagggcaagtccaagaaactgaagagtgtgaaagagctgctggggatcaccatcatggaaagaagcagcttcgagaagaatcccatcgactttctggaagccaagggctacaaagaagtgaaaaaggacctgatcatcaagctgcctaagtactccctgttcgagctggaaaacggccggaagagaatgctggcctctgccggcgaactgcagaagggaaacgaactggccctgccctccaaatatgtgaacttcctgtacctggccagccactatgagaagctgaagggctcccccgaggataatgagcagaaacagctgtttgtggaacagcacaaacactacctggacgagatcatcgagcagatcagcgagttctccaagagagtgatcctggccgacgctaatctggacaaggtgctgagcgcctacaacaagcacagagacaagcctatcagagagcaggccgagaatatcatccacctgtttaccctgaccaatctgggagcccctgccgccttcaagtactttgacaccaccatcgaccggaagaggtacaccagcaccaaagaggtgctggacgccaccctgatccaccagagcatcaccggcctgtacgagacacggatcgacctgtctcagctgggaggcgacgcctatccctatgacgtgcccgattatgccagcctgggcagcggctcccccaagaaaaaacgcaaggtggaagatcctaagaaaaagcggaaagtggacggcctcgagtaatgagatcccaagcacgcagcaatgcagctcaaaacgcttagcctagccacacccccacgggaaacagcagtgattaacctttagcaataaacgaaagtttaactaagctatactaaccccagggttggtcaatttcgtgccagccacaccctggtactgcatgcacgcaatgctagctgcccctttcccgtcctgggcaccccgagtctcccccgaccccgggtcccaggtatgctcccacctccacctgccccactcaccacctctgctagttccagacacctccgagacgagg

SEQ ID NO: 309 - RNA, 8299 nt, synthetic construct
  misc_feature 1..8299: note = V57 mRNA
  source 1..8299: mol_type = other RNA
aggactcactatttgttttcgcgcccagttgcaaaaagtgtcgacatttgcttctgacacaactgtgttcactagcaacctcaaacagacaccgccaccatgcctgctgctaagagagtgaaactggatggatccgccaagaccgtggcctatttctacgaccccgacgtgggcaacttccactacggagctggacaccctatgaagccccatcgcctggcattgacccatagcctggtcctgcattacggtctctataagaagatgatcgtgttcaagccataccaggcctcccaacatgacatgtgccgcttccactccgaggactacattgacttcctgcagagagtcagccccaccaatatgcaaggcttcaccaagagtcttaatgccttcaacgtaggcgatgactgcccagtgtttcccgggctctttgagttctgctcgcgttacacaggcgcatctctgcaaggagcaacccagctgaacaacaagatctgtgatattgccattaactgggctggtggtctgcaccatgccaagaagtttgaggcctctggcttctgctatgtcaacgacattgtgattggcatcctggagctgctcaagtaccaccctcgggtgctctacattgacattgacatccaccatggtgacggggttcaagaagctttctacctcactgaccgggtcatgacggtgtccttccacaaatacggaaattacttcttccctggcacaggtgacatgtatgaagtcggggcagagagtggccgctactactgtctgaacgtgcccctgcgggatggcattgatgaccagagttacaagcaccttttccagccggttatcaaccaggtagtggacttctaccaacccacgtgcattgtgctccagtgtggagctgactctctgggctgtgatcgattgggctgctttaacctcagcatccgagggcatggggaatgcgttgaatatgtcaagagcttcaatatccctctactcgtgctgggtggtggtggttatactgtccgaaatgttgcccgctgctggacatatgagacatcgctgctggtagaagaggccattagtgaggagcttccctatagtgaatacttcgagtactttgccccagacttcacacttcatccagatgtcagcacccgcatcgagaatcagaactcacgccagtatctggaccagatccgccagacaatctttgaaaacctgggagggccgagctctggcgcacccccaccaagtggagggtctcctgccgggtccccaacatctactgaagaaggcaccagcgaatccgcaacgcccgagtcaggccctggtacctccacagaaccatctgaaggtagtgcgcctggttccccagctggaagccctacttccaccgaagaaggcacgtcaaccgaaccaagtgaaggatctgcccctgggaccagcactgaaccatctgagccaaaaaagaagagaaaggtaatggacaagaagtacagcatcggcctggccatcggcaccaactctgtgggctgggccgtgatcaccgacgagtacaaggtgcccagcaagaaattcaaggtgctgggcaacaccgaccggcacagcatcaagaagaacctgatcggcgccctgctgttcgacagcggagaaacagccgaggccacccggctgaagagaaccgccagaagaagatacaccagacggaagaaccggatctgctatctgcaagagatcttcagcaacgagatggccaaggtggacgacagcttcttccacagactggaagagtccttcctggtggaagaggataagaagcacgagcggcaccccatcttcggcaacatcgtggacgaggtggcctaccacgagaagtaccccaccatctaccacctgagaaagaaactggtggacagcaccgacaaggccgacctgcggctgatctatctggccctggcccacatgatcaagttccggggccacttcctgatcgagggcgacctgaaccccgacaacagcgacgtggacaagctgttcatccagctggtgcagacctacaaccagctgttcgaggaaaaccccatcaacgccagcggcgtggacgccaaggccatcctgtctgccagactgagcaagagcagacggctggaaaatctgatcgcccagctgcccggcgagaagaagaatggcctgttcggcaacctgattgccctgagcctgggcctgacccccaacttcaagagcaacttcgacctggccgaggatgccaaactgcagctgagcaaggacacctacgacgacgacctggacaacctgctggcccagatcggcgaccagtacgccgacctgtttctggccgccaagaacctgtccgacgccatcctgctgagcgacatcctgagagtgaacaccgagatcaccaaggcccccctgagcgcctctatgatcaagagatacgacgagcaccaccaggacctgaccctgctgaaagctctcgtgcggcagcagctgcctgagaagtacaaagagattttcttcgaccagagcaagaacggctacgccggctacatcgatggcggagccagccaggaagagttctacaagttcatcaagcccatcctggaaaagatggacggcaccgaggaactgctcgtgaagctgaacagagaggacctgctgcggaagcagcggaccttcgacaacggcagcatcccccaccagatccacctgggagagctgcacgccattctgcggcggcaggaagatttttacccattcctgaaggacaaccgggaaaagatcgagaagatcctgaccttccgcatcccctactacgtgggccctctggccaggggaaacagcagattcgcctggatgaccagaaagagcgaggaaaccatcaccccctggaacttcgaggaagtggtggacaagggcgccagcgcccagagcttcatcgagcggatgaccaacttcgataagaacctgcccaacgagaaggtgctgcccaagcacagcctgctgtacgagtacttcaccgtgtacaacgagctgaccaaagtgaaatacgtgaccgagggaatgagaaagcccgccttcctgagcggcgagcagaaaaaagccatcgtggacctgctgttcaagaccaaccggaaagtgaccgtgaagcagctgaaagaggactacttcaagaaaatcgagtgcttcgactccgtggaaatctccggcgtggaagatcggttcaacgcctccctgggcacataccacgatctgctgaaaattatcaaggacaaggacttcctggacaatgaggaaaacgaggacattctggaagatatcgtgctgaccctgacactgtttgaggacagagagatgatcgaggaacggctgaaaacctatgcccacctgttcgacgacaaagtgatgaagcagctgaagcggcggagatacaccggctggggcaggctgagccggaagctgatcaacggcatccgggacaagcagtccggcaagacaatcctggatttcctgaagtccgacggcttcgccaacagaaacttcatgcagctgatccacgacgacagcctgacctttaaagaggacatccagaaagcccaggtgtccggccagggcgatagcctgcacgagcacattgccaatctggccggcagccccgccattaagaagggcatcctgcagacagtgaaggtggtggacgagctcgtgaaagtgatgggccggcacaagcccgagaacatcgtgatcgaaatggccagagagaaccagaccacccagaagggacagaagaacagccgcgagagaatgaagcggatcgaagagggcatcaaagagctgggcagccagatcctgaaagaacaccccgtggaaaacacccagctgcagaacgagaagctgtacctgtactacctgcagaatgggcgggatatgtacgtggaccaggaactggacatcaaccggctgtccgactacgatgtggacgctatcgtgcctcagagctttctgaaggacgactccatcgataacaaagtgctgactcggagcgacaagaaccggggcaagagcgacaacgtgccctccgaagaggtcgtgaagaagatgaagaactactggcgccagctgctgaatgccaagctgattacccagaggaagttcgacaatctgaccaaggccgagagaggcggcctgagcgaactggataaggccggcttcatcaagagacagctggtggaaacccggcagatcacaaagcacgtggcacagatcctggactcccggatgaacactaagtacgacgagaacgacaaactgatccgggaagtgaaagtgatcaccctgaagtccaagctggtgtccgatttccggaaggatttccagttttacaaagtgcgcgagatcaacaactaccaccacgcccacgacgcctacctgaacgccgtcgtgggaaccgccctgatcaaaaagtaccctaagctggaaagcgagttcgtgtacggcgactacaaggtgtacgacgtgcggaagatgatcgccaagagcgagcaggaaatcggcaaggctaccgccaagtacttcttctacagcaacatcatgaactttttcaagaccgagattaccctggccaacggcgagatccggaagcggcctctgatcgagacaaacggcgaaacaggcgagatcgtgtgggataagggccgggactttgccaccgtgcggaaagtgctgtctatgccccaagtgaatatcgtgaaaaagaccgaggtgcagacaggcggcttcagcaaagagtctatcctgcccaagaggaacagcgacaagctgatcgccagaaagaaggactgggaccctaagaagtacggcggcttcgacagccccaccgtggcctattctgtgctggtggtggccaaagtggaaaagggcaagtccaagaaactgaagagtgtgaaagagctgctggggatcaccatcatggaaagaagcagcttcgagaagaatcccatcgactttctggaagccaagggctacaaagaagtgaaaaaggacctgatcatcaagctgcctaagtactccctgttcgagctggaaaacggccggaagagaatgctggcctctgccggcgaactgcagaagggaaacgaactggccctgccctccaaatatgtgaacttcctgtacctggccagccactatgagaagctgaagggctcccccgaggataatgagcagaaacagctgtttgtggaacagcacaaacactacctggacgagatcatcgagcagatcagcgagttctccaagagagtgatcctggccgacgctaatctggacaaggtgctgagcgcctacaacaagcacagagacaagcctatcagagagcaggccgagaatatcatccacctgtttaccctgaccaatctgggagcccctgccgccttcaagtactttgacaccaccatcgaccggaagaggtacaccagcaccaaagaggtgctggacgccaccctgatccaccagagcatcaccggcctgtacgagacacggatcgacctgtctcagctgggaggcgacgcctatccctatgacgtgcccgattatgccagcctgggcagcggctcccccaagaaaaaacgcaaggtggaagatcctaagaaaaagcggaaagtggacggcagcggcagcgagacccccggtaccagcgagagcgccacccccgagagccggacactcggccagactgggaagaaatctgagaagggaccagtttgttggcggaagcgtgtaaaatcagagtacatgcgactgagacagctcaagaggttcagacgagctgatgaagtaaagagtatgtttagttccaatcgtcagaaaattttggaaagaacggaaatcttaaaccaagaatggaaacagcgaaggatacagcctgtgcacatcctgacttctgtgagctcattgcgcgggactagggagtgttcggtgaccagtgacttggattttccaacacaagtcatcccattaaagactctgaatgcagttgcttcagtacccataatgtattcttggtctcccctacagcagaattttatggtggaagatgaaactgttttacataacattccttatatgggagatgaagttttagatcaggatggtactttcattgaagaactaataaaaaattatgatgggaaagtacacggggatagagaatgtgggtttataaatgatgaaatttttgtggagttggtgaatgcccttggtcaatataatgatgatgacgatgatgatgatggagacgatcctgaagaaagagaagaaaagcagaaagatctggaggatcaccgagatgataaagaaagccgcccacctcggaaatttccttctgataaaatttttgaagccatttcctcaatgtttccagataagggcacagcagaagaactaaaggaaaaatataaagaactcaccgaacagcagctcccaggcgcacttcctcctgaatgtacccccaacatagatggaccaaatgctaaatctgttcagagagagcaaagcttacactcctttcatacgcttttctgtaggcgatgttttaaatatgactgcttcctacatccttttcatgcaacacccaacacttataagcggaagaacacagaaacagctctagacaacaaaccttgtggaccacagtgttaccagcatttggagggagcaaaggagtttgctgctgctctcaccgctgagcggataaagaccccaccaaaacgtccaggaggccgcagaagaggacggcttcccaataacagtagcaggcccagcacccccaccattaatgtgctggaatcaaaggatacagacagtgatagggaagcagggactgaaacggggggagagaacaatgataaagaagaagaagagaagaaagatgaaacttcgagctcctctgaagcaaattctcggtgtcaaacaccaataaagatgaagccaaatattgaacctcctgagaatgtggagtggagtggtgctgaagcctcaatgtttagagtcctcattggcacttactatgacaatttctgtgccattgctaggttaattgggaccaaaacatgtagacaggtgtatgagtttagagtcaaagaatctagcatcatagctccagctcccgctgaggatgtggatactcctccaaggaaaaagaagaggaaacaccggttgtgggctgcacactgcagaaagatacagctgaaaaaggacggctcctctaaccatgtttacaactatcaaccctgtgatcatccacggcagccttgtgacagttcgtgcccttgtgtgatagcacaaaatttttgtgaaaagttttgtcaatgtagttcagagtgtcaaaaccgctttccgggatgccgctgcaaagcacagtgcaacaccaagcagtgcccgtgctacctggctgtccgagagtgtgaccctgacctctgtcttacttgtggagccgctgaccattgggacagtaaaaatgtgtcctgcaagaactgcagtattcagcggggctccaaaaagcatctattgctggcaccatctgacgtggcaggctgggggatttttatcaaagatcctgtgcagaaaaatgaattcatctcagaatactgtggagagattatttctcaagatgaagctgacagaagagggaaagtgtatgataaatacatgtgcagctttctgttcaacttgaacaatgattttgtggtggatgcaacccgcaagggtaacaaaattcgttttgcaaatcattcggtaaatccaaactgctatgcaaaagttatgatggttaacggtgatcacaggataggtatttttgccaagagagccatccagactggcgaagagctgttttttgattacagatacagccaggctgatgccctgaagtatgtcggcatcgaaagagaaatggaaatccctgagggcagcggctaatgagatcccaagcacgcagcaatgcagctcaaaacgcttagcctagccacacccccacgggaaacagcagtgattaacctttagcaataaacgaaagtttaactaagctatactaaccccagggttggtcaatttcgtgccagccacaccctggtactgcatgcacgcaatgctagctgcccctttcccgtcctgggcaccccgagtctcccccgaccccgggtcccaggtatgctcccacctccacctgccccactcaccacctctgctagttccagacacctccgagacgagg

SEQ ID NO: 310 - RNA, 7390 nt, synthetic construct
  misc_feature 1..7390: note = V58 mRNA
  source 1..7390: mol_type = other RNA
aggactcactatttgttttcgcgcccagttgcaaaaagtgtcgacatttgcttctgacacaactgtgttcactagcaacctcaaacagacaccgccaccatgcctgctgctaagagagtgaaactggatggatcccggacactggtgaccttcaaggatgtatttgtggacttcaccagggaggagtggaagctgctggacactgctcagcagatcgtgtacagaaatgtgatgctggagaactataagaacctggtttccttgggttatcagcttactaagccagatgtgatcctccggttggagaagggagaagagcccggagggccgagctctggcgcacccccaccaagtggagggtctcctgccgggtccccaacatctactgaagaaggcaccagcgaatccgcaacgcccgagtcaggccctggtacctccacagaaccatctgaaggtagtgcgcctggttccccagctggaagccctacttccaccgaagaaggcacgtcaaccgaaccaagtgaaggatctgcccctgggaccagcactgaaccatctgagccaaaaaagaagagaaaggtaatggacaagaagtacagcatcggcctggccatcggcaccaactctgtgggctgggccgtgatcaccgacgagtacaaggtgcccagcaagaaattcaaggtgctgggcaacaccgaccggcacagcatcaagaagaacctgatcggcgccctgctgttcgacagcggagaaacagccgaggccacccggctgaagagaaccgccagaagaagatacaccagacggaagaaccggatctgctatctgcaagagatcttcagcaacgagatggccaaggtggacgacagcttcttccacagactggaagagtccttcctggtggaagaggataagaagcacgagcggcaccccatcttcggcaacatcgtggacgaggtggcctaccacgagaagtaccccaccatctaccacctgagaaagaaactggtggacagcaccgacaaggccgacctgcggctgatctatctggccctggcccacatgatcaagttccggggccacttcctgatcgagggcgacctgaaccccgacaacagcgacgtggacaagctgttcatccagctggtgcagacctacaaccagctgttcgaggaaaaccccatcaacgccagcggcgtggacgccaaggccatcctgtctgccagactgagcaagagcagacggctggaaaatctgatcgcccagctgcccggcgagaagaagaatggcctgttcggcaacctgattgccctgagcctgggcctgacccccaacttcaagagcaacttcgacctggccgaggatgccaaactgcagctgagcaaggacacctacgacgacgacctggacaacctgctggcccagatcggcgaccagtacgccgacctgtttctggccgccaagaacctgtccgacgccatcctgctgagcgacatcctgagagtgaacaccgagatcaccaaggcccccctgagcgcctctatgatcaagagatacgacgagcaccaccaggacctgaccctgctgaaagctctcgtgcggcagcagctgcctgagaagtacaaagagattttcttcgaccagagcaagaacggctacgccggctacatcgatggcggagccagccaggaagagttctacaagttcatcaagcccatcctggaaaagatggacggcaccgaggaactgctcgtgaagctgaacagagaggacctgctgcggaagcagcggaccttcgacaacggcagcatcccccaccagatccacctgggagagctgcacgccattctgcggcggcaggaagatttttacccattcctgaaggacaaccgggaaaagatcgagaagatcctgaccttccgcatcccctactacgtgggccctctggccaggggaaacagcagattcgcctggatgaccagaaagagcgaggaaaccatcaccccctggaacttcgaggaagtggtggacaagggcgccagcgcccagagcttcatcgagcggatgaccaacttcgataagaacctgcccaacgagaaggtgctgcccaagcacagcctgctgtacgagtacttcaccgtgtacaacgagctgaccaaagtgaaatacgtgaccgagggaatgagaaagcccgccttcctgagcggcgagcagaaaaaagccatcgtggacctgctgttcaagaccaaccggaaagtgaccgtgaagcagctgaaagaggactacttcaagaaaatcgagtgcttcgactccgtggaaatctccggcgtggaagatcggttcaacgcctccctgggcacataccacgatctgctgaaaattatcaaggacaaggacttcctggacaatgaggaaaacgaggacattctggaagatatcgtgctgaccctgacactgtttgaggacagagagatgatcgaggaacggctgaaaacctatgcccacctgttcgacgacaaagtgatgaagcagctgaagcggcggagatacaccggctggggcaggctgagccggaagctgatcaacggcatccgggacaagcagtccggcaagacaatcctggatttcctgaagtccgacggcttcgccaacagaaacttcatgcagctgatccacgacgacagcctgacctttaaagaggacatccagaaagcccaggtgtccggccagggcgatagcctgcacgagcacattgccaatctggccggcagccccgccattaagaagggcatcctgcagacagtgaaggtggtggacgagctcgtgaaagtgatgggccggcacaagcccgagaacatcgtgatcgaaatggccagagagaaccagaccacccagaagggacagaagaacagccgcgagagaatgaagcggatcgaagagggcatcaaagagctgggcagccagatcctgaaagaacaccccgtggaaaacacccagctgcagaacgagaagctgtacctgtactacctgcagaatgggcgggatatgtacgtggaccaggaactggacatcaaccggctgtccgactacgatgtggacgctatcgtgcctcagagctttctgaaggacgactccatcgataacaaagtgctgactcggagcgacaagaaccggggcaagagcgacaacgtgccctccgaagaggtcgtgaagaagatgaagaactactggcgccagctgctgaatgccaagctgattacccagaggaagttcgacaatctgaccaaggccgagagaggcggcctgagcgaactggataaggccggcttcatcaagagacagctggtggaaacccggcagatcacaaagcacgtggcacagatcctggactcccggatgaacactaagtacgacgagaacgacaaactgatccgggaagtgaaagtgatcaccctgaagtccaagctggtgtccgatttccggaaggatttccagttttacaaagtgcgcgagatcaacaactaccaccacgcccacgacgcctacctgaacgccgtcgtgggaaccgccctgatcaaaaagtaccctaagctggaaagcgagttcgtgtacggcgactacaaggtgtacgacgtgcggaagatgatcgccaagagcgagcaggaaatcggcaaggctaccgccaagtacttcttctacagcaacatcatgaactttttcaagaccgagattaccctggccaacggcgagatccggaagcggcctctgatcgagacaaacggcgaaacaggcgagatcgtgtgggataagggccgggactttgccaccgtgcggaaagtgctgtctatgccccaagtgaatatcgtgaaaaagaccgaggtgcagacaggcggcttcagcaaagagtctatcctgcccaagaggaacagcgacaagctgatcgccagaaagaaggactgggaccctaagaagtacggcggcttcgacagccccaccgtggcctattctgtgctggtggtggccaaagtggaaaagggcaagtccaagaaactgaagagtgtgaaagagctgctggggatcaccatcatggaaagaagcagcttcgagaagaatcccatcgactttctggaagccaagggctacaaagaagtgaaaaaggacctgatcatcaagctgcctaagtactccctgttcgagctggaaaacggccggaagagaatgctggcctctgccggcgaactgcagaagggaaacgaactggccctgccctccaaatatgtgaacttcctgtacctggccagccactatgagaagctgaagggctcccccgaggataatgagcagaaacagctgtttgtggaacagcacaaacactacctggacgagatcatcgagcagatcagcgagttctccaagagagtgatcctggccgacgctaatctggacaaggtgctgagcgcctacaacaagcacagagacaagcctatcagagagcaggccgagaatatcatccacctgtttaccctgaccaatctgggagcccctgccgccttcaagtactttgacaccaccatcgaccggaagaggtacaccagcaccaaagaggtgctggacgccaccctgatccaccagagcatcaccggcctgtacgagacacggatcgacctgtctcagctgggaggcgacgcctatccctatgacgtgcccgattatgccagcctgggcagcggctcccccaagaaaaaacgcaaggtggaagatcctaagaaaaagcggaaagtggacggcagcggcagcgagacccccggtaccagcgagagcgccacccccgagagccggacactcggccagactgggaagaaatctgagaagggaccagtttgttggcggaagcgtgtaaaatcagagtacatgcgactgagacagctcaagaggttcagacgagctgatgaagtaaagagtatgtttagttccaatcgtcagaaaattttggaaagaacggaaatcttaaaccaagaatggaaacagcgaaggatacagcctgtgcacatcctgacttctgtgagctcattgcgcgggactagggagtgttcggtgaccagtgacttggattttccaacacaagtcatcccattaaagactctgaatgcagttgcttcagtacccataatgtattcttggtctcccctacagcagaattttatggtggaagatgaaactgttttacataacattccttatatgggagatgaagttttagatcaggatggtactttcattgaagaactaataaaaaattatgatgggaaagtacacggggatagagaatgtgggtttataaatgatgaaatttttgtggagttggtgaatgcccttggtcaatataatgatgatgacgatgatgatgatggagacgatcctgaagaaagagaagaaaagcagaaagatctggaggatcaccgagatgataaagaaagccgcccacctcggaaatttccttctgataaaatttttgaagccatttcctcaatgtttccagataagggcacagcagaagaactaaaggaaaaatataaagaactcaccgaacagcagctcccaggcgcacttcctcctgaatgtacccccaacatagatggaccaaatgctaaatctgttcagagagagcaaagcttacactcctttcatacgcttttctgtaggcgatgttttaaatatgactgcttcctacatccttttcatgcaacacccaacacttataagcggaagaacacagaaacagctctagacaacaaaccttgtggaccacagtgttaccagcatttggagggagcaaaggagtttgctgctgctctcaccgctgagcggataaagaccccaccaaaacgtccaggaggccgcagaagaggacggcttcccaataacagtagcaggcccagcacccccaccattaatgtgctggaatcaaaggatacagacagtgatagggaagcagggactgaaacggggggagagaacaatgataaagaagaagaagagaagaaagatgaaacttcgagctcctctgaagcaaattctcggtgtcaaacaccaataaagatgaagccaaatattgaacctcctgagaatgtggagtggagtggtgctgaagcctcaatgtttagagtcctcattggcacttactatgacaatttctgtgccattgctaggttaattgggaccaaaacatgtagacaggtgtatgagtttagagtcaaagaatctagcatcatagctccagctcccgctgaggatgtggatactcctccaaggaaaaagaagaggaaacaccggttgtgggctgcacactgcagaaagatacagctgaaaaaggacggctcctctaaccatgtttacaactatcaaccctgtgatcatccacggcagccttgtgacagttcgtgcccttgtgtgatagcacaaaatttttgtgaaaagttttgtcaatgtagttcagagtgtcaaaaccgctttccgggatgccgctgcaaagcacagtgcaacaccaagcagtgcccgtgctacctggctgtccgagagtgtgaccctgacctctgtcttacttgtggagccgctgaccattgggacagtaaaaatgtgtcctgcaagaactgcagtattcagcggggctccaaaaagcatctattgctggcaccatctgacgtggcaggctgggggatttttatcaaagatcctgtgcagaaaaatgaattcatctcagaatactgtggagagattatttctcaagatgaagctgacagaagagggaaagtgtatgataaatacatgtgcagctttctgttcaacttgaacaatgattttgtggtggatgcaacccgcaagggtaacaaaattcgttttgcaaatcattcggtaaatccaaactgctatgcaaaagttatgatggttaacggtgatcacaggataggtatttttgccaagagagccatccagactggcgaagagctgttttttgattacagatacagccaggctgatgccctgaagtatgtcggcatcgaaagagaaatggaaatccctgagggcagcggctaatgagatcccaagcacgcagcaatgcagctcaaaacgcttagcctagccacacccccacgggaaacagcagtgattaacctttagcaataaacgaaagtttaactaagctatactaaccccagggttggtcaatttcgtgccagccacaccctggtactgcatgcacgcaatgctagctgcccctttcccgtcctgggcaccccgagtctcccccgaccccgggtcccaggtatgctcccacctccacctgccccactcaccacctctgctagttccagacacctccgagacgagg

SEQ ID NO: 311 - RNA, 8536 nt, synthetic construct
  misc_feature 1..8536: note = V59 mRNA
  source 1..8536: mol_type = other RNA
aggactcactatttgttttcgcgcccagttgcaaaaagtgtcgacatttgcttctgacacaactgtgttcactagcaacctcaaacagacaccgccaccatgcctgctgctaagagagtgaaactggatggatcccggacactggtgaccttcaaggatgtatttgtggacttcaccagggaggagtggaagctgctggacactgctcagcagatcgtgtacagaaatgtgatgctggagaactataagaacctggtttccttgggttatcagcttactaagccagatgtgatcctccggttggagaagggagaagagcccggagggccgagctctggcgcacccccaccaagtggagggtctcctgccgggtccccaacatctactgaagaaggcaccagcgaatccgcaacgcccgagtcaggccctggtacctccacagaaccatctgaaggtagtgcgcctggttccccagctggaagccctacttccaccgaagaaggcacgtcaaccgaaccaagtgaaggatctgcccctgggaccagcactgaaccatctgagatgaaccatgaccaggaatttgaccccccaaaggtttacccacctgtgccagctgagaagaggaagcccatccgcgtgctgtctctctttgatgggattgctacagggctcctggtgctgaaggacctgggcatccaagtggaccgctacattgcctccgaggtgtgtgaggactccatcacggtgggcatggtgcggcaccagggaaagatcatgtacgtcggggacgtccgcagcgtcacacagaagcatatccaggagtggggcccattcgacctggtgattggaggcagtccctgcaatgacctctccattgtcaaccctgcccgcaagggactttatgagggtactggccgcctcttctttgagttctaccgcctcctgcatgatgcgcggcccaaggagggagatgatcgccccttcttctggctctttgagaatgtggtggccatgggcgttagtgacaagagggacatctcgcgatttcttgagtctaaccccgtgatgattgacgccaaagaagtgtctgctgcacacagggcccgttacttctggggtaaccttcctggcatgaacaggcctttggcatccactgtgaatgataagctggagctgcaagagtgtctggagcacggcagaatagccaagttcagcaaagtgaggaccattaccaccaggtcaaactctataaagcagggcaaagaccagcatttccccgtcttcatgaacgagaaggaggacatcctgtggtgcactgaaatggaaagggtgtttggcttccccgtccactacacagacgtctccaacatgagccgcttggcgaggcagagactgctgggccgatcgtggagcgtgccggtcatccgccacctcttcgctccgctgaaggaatattttgcttgtgtgggagggccgagctctggcgcacccccaccaagtggagggtctcctgccgggtccccaacatctactgaagaaggcaccagcgaatccgcaacgcccgagtcaggccctggtacctccacagaaccatctgaaggtagtgcgcctggttccccagctggaagccctacttccaccgaagaaggcacgtcaaccgaaccaagtgaaggatctgcccctgggaccagcactgaaccatctgagccaaaaaagaagagaaaggtaatggacaagaagtacagcatcggcctggccatcggcaccaactctgtgggctgggccgtgatcaccgacgagtacaaggtgcccagcaagaaattcaaggtgctgggcaacaccgaccggcacagcatcaagaagaacctgatcggcgccctgctgttcgacagcggagaaacagccgaggccacccggctgaagagaaccgccagaagaagatacaccagacggaagaaccggatctgctatctgcaagagatcttcagcaacgagatggccaaggtggacgacagcttcttccacagactggaagagtccttcctggtggaagaggataagaagcacgagcggcaccccatcttcggcaacatcgtggacgaggtggcctaccacgagaagtaccccaccatctaccacctgagaaagaaactggtggacagcaccgacaaggccgacctgcggctgatctatctggccctggcccacatgatcaagttccggggccacttcctgatcgagggcgacctgaaccccgacaacagcgacgtggacaagctgttcatccagctggtgcagacctacaaccagctgttcgaggaaaaccccatcaacgccagcggcgtggacgccaaggccatcctgtctgccagactgagcaagagcagacggctggaaaatctgatcgcccagctgcccggcgagaagaagaatggcctgttcggcaacctgattgccctgagcctgggcctgacccccaacttcaagagcaacttcgacctggccgaggatgccaaactgcagctgagcaaggacacctacgacgacgacctggacaacctgctggcccagatcggcgaccagtacgccgacctgtttctggccgccaagaacctgtccgacgccatcctgctgagcgacatcctgagagtgaacaccgagatcaccaaggcccccctgagcgcctctatgatcaagagatacgacgagcaccaccaggacctgaccctgctgaaagctctcgtgcggcagcagctgcctgagaagtacaaagagattttcttcgaccagagcaagaacggctacgccggctacatcgatggcggagccagccaggaagagttctacaagttcatcaagcccatcctggaaaagatggacggcaccgaggaactgctcgtgaagctgaacagagaggacctgctgcggaagcagcggaccttcgacaacggcagcatcccccaccagatccacctgggagagctgcacgccattctgcggcggcaggaagatttttacccattcctgaaggacaaccgggaaaagatcgagaagatcctgaccttccgcatcccctactacgtgggccctctggccaggggaaacagcagattcgcctggatgaccagaaagagcgaggaaaccatcaccccctggaacttcgaggaagtggtggacaagggcgccagcgcccagagcttcatcgagcggatgaccaacttcgataagaacctgcccaacgagaaggtgctgcccaagcacagcctgctgtacgagtacttcaccgtgtacaacgagctgaccaaagtgaaatacgtgaccgagggaatgagaaagcccgccttcctgagcggcgagcagaaaaaagccatcgtggacctgctgttcaagaccaaccggaaagtgaccgtgaagcagctgaaagaggactacttcaagaaaatcgagtgcttcgactccgtggaaatctccggcgtggaagatcggttcaacgcctccctgggcacataccacgatctgctgaaaattatcaaggacaaggacttcctggacaatgaggaaaacgaggacattctggaagatatcgtgctgaccctgacactgtttgaggacagagagatgatcgaggaacggctgaaaacctatgcccacctgttcgacgacaaagtgatgaagcagctgaagcggcggagatacaccggctggggcaggctgagccggaagctgatcaacggcatccgggacaagcagtccggcaagacaatcctggatttcctgaagtccgacggcttcgccaacagaaacttcatgcagctgatccacgacgacagcctgacctttaaagaggacatccagaaagcccaggtgtccggccagggcgatagcctgcacgagcacattgccaatctggccggcagccccgccattaagaagggcatcctgcagacagtgaaggtggtggacgagctcgtgaaagtgatgggccggcacaagcccgagaacatcgtgatcgaaatggccagagagaaccagaccacccagaagggacagaagaacagccgcgagagaatgaagcggatcgaagagggcatcaaagagctgggcagccagatcctgaaagaacaccccgtggaaaacacccagctgcagaacgagaagctgtacctgtactacctgcagaatgggcgggatatgtacgtggaccaggaactggacatcaaccggctgtccgactacgatgtggacgctatcgtgcctcagagctttctgaaggacgactccatcgataacaaagtgctgactcggagcgacaagaaccggggcaagagcgacaacgtgccctccgaagaggtcgtgaagaagatgaagaactactggcgccagctgctgaatgccaagctgattacccagaggaagttcgacaatctgaccaaggccgagagaggcggcctgagcgaactggataaggccggcttcatcaagagacagctggtggaaacccggcagatcacaaagcacgtggcacagatcctggactcccggatgaacactaagtacgacgagaacgacaaactgatccgggaagtgaaagtgatcaccctgaagtccaagctggtgtccgatttccggaaggatttccagttttacaaagtgcgcgagatcaacaactaccaccacgcccacgacgcctacctgaacgccgtcgtgggaaccgccctgatcaaaaagtaccctaagctggaaagcgagttcgtgtacggcgactacaaggtgtacgacgtgcggaagatgatcgccaagagcgagcaggaaatcggcaaggctaccgccaagtacttcttctacagcaacatcatgaactttttcaagaccgagattaccctggccaacggcgagatccggaagcggcctctgatcgagacaaacggcgaaacaggcgagatcgtgtgggataagggccgggactttgccaccgtgcggaaagtgctgtctatgccccaagtgaatatcgtgaaaaagaccgaggtgcagacaggcggcttcagcaaagagtctatcctgcccaagaggaacagcgacaagctgatcgccagaaagaaggactgggaccctaagaagtacggcggcttcgacagccccaccgtggcctattctgtgctggtggtggccaaagtggaaaagggcaagtccaagaaactgaagagtgtgaaagagctgctggggatcaccatcatggaaagaagcagcttcgagaagaatcccatcgactttctggaagccaagggctacaaagaagtgaaaaaggacctgatcatcaagctgcctaagtactccctgttcgagctggaaaacggccggaagagaatgctggcctctgccggcgaactgcagaagggaaacgaactggccctgccctccaaatatgtgaacttcctgtacctggccagccactatgagaagctgaagggctcccccgaggataatgagcagaaacagctgtttgtggaacagcacaaacactacctggacgagatcatcgagcagatcagcgagttctccaagagagtgatcctggccgacgctaatctggacaaggtgctgagcgcctacaacaagcacagagacaagcctatcagagagcaggccgagaatatcatccacctgtttaccctgaccaatctgggagcccctgccgccttcaagtactttgacaccaccatcgaccggaagaggtacaccagcaccaaagaggtgctggacgccaccctgatccaccagagcatcaccggcctgtacgagacacggatcgacctgtctcagctgggaggcgacgcctatccctatgacgtgcccgattatgccagcctgggcagcggctcccccaagaaaaaacgcaaggtggaagatcctaagaaaaagcggaaagtggacggcagcggcagcgagacccccggtaccagcgagagcgccacccccgagagccggacactcggccagactgggaagaaatctgagaagggaccagtttgttggcggaagcgtgtaaaatcagagtacatgcgactgagacagctcaagaggttcagacgagctgatgaagtaaagagtatgtttagttccaatcgtcagaaaattttggaaagaacggaaatcttaaaccaagaatggaaacagcgaaggatacagcctgtgcacatcctgacttctgtgagctcattgcgcgggactagggagtgttcggtgaccagtgacttggattttccaacacaagtcatcccattaaagactctgaatgcagttgcttcagtacccataatgtattcttggtctcccctacagcagaattttatggtggaagatgaaactgttttacataacattccttatatgggagatgaagttttagatcaggatggtactttcattgaagaactaataaaaaattatgatgggaaagtacacggggatagagaatgtgggtttataaatgatgaaatttttgtggagttggtgaatgcccttggtcaatataatgatgatgacgatgatgatgatggagacgatcctgaagaaagagaagaaaagcagaaagatctggaggatcaccgagatgataaagaaagccgcccacctcggaaatttccttctgataaaatttttgaagccatttcctcaatgtttccagataagggcacagcagaagaactaaaggaaaaatataaagaactcaccgaacagcagctcccaggcgcacttcctcctgaatgtacccccaacatagatggaccaaatgctaaatctgttcagagagagcaaagcttacactcctttcatacgcttttctgtaggcgatgttttaaatatgactgcttcctacatccttttcatgcaacacccaacacttataagcggaagaacacagaaacagctctagacaacaaaccttgtggaccacagtgttaccagcatttggagggagcaaaggagtttgctgctgctctcaccgctgagcggataaagaccccaccaaaacgtccaggaggccgcagaagaggacggcttcccaataacagtagcaggcccagcacccccaccattaatgtgctggaatcaaaggatacagacagtgatagggaagcagggactgaaacggggggagagaacaatgataaagaagaagaagagaagaaagatgaaacttcgagctcctctgaagcaaattctcggtgtcaaacaccaataaagatgaagccaaatattgaacctcctgagaatgtggagtggagtggtgctgaagcctcaatgtttagagtcctcattggcacttactatgacaatttctgtgccattgctaggttaattgggaccaaaacatgtagacaggtgtatgagtttagagtcaaagaatctagcatcatagctccagctcccgctgaggatgtggatactcctccaaggaaaaagaagaggaaacaccggttgtgggctgcacactgcagaaagatacagctgaaaaaggacggctcctctaaccatgtttacaactatcaaccctgtgatcatccacggcagccttgtgacagttcgtgcccttgtgtgatagcacaaaatttttgtgaaaagttttgtcaatgtagttcagagtgtcaaaaccgctttccgggatgccgctgcaaagcacagtgcaacaccaagcagtgcccgtgctacctggctgtccgagagtgtgaccctgacctctgtcttacttgtggagccgctgaccattgggacagtaaaaatgtgtcctgcaagaactgcagtattcagcggggctccaaaaagcatctattgctggcaccatctgacgtggcaggctgggggatttttatcaaagatcctgtgcagaaaaatgaattcatctcagaatactgtggagagattatttctcaagatgaagctgacagaagagggaaagtgtatgataaatacatgtgcagctttctgttcaacttgaacaatgattttgtggtggatgcaacccgcaagggtaacaaaattcgttttgcaaatcattcggtaaatccaaactgctatgcaaaagttatgatggttaacggtgatcacaggataggtatttttgccaagagagccatccagactggcgaagagctgttttttgattacagatacagccaggctgatgccctgaagtatgtcggcatcgaaagagaaatggaaatccctgagggcagcggctaatgagatcccaagcacgcagcaatgcagctcaaaacgcttagcctagccacacccccacgggaaacagcagtgattaacctttagcaataaacgaaagtttaactaagctatactaaccccagggttggtcaatttcgtgccagccacaccctggtactgcatgcacgcaatgctagctgcccctttcccgtcctgggcaccccgagtctcccccgaccccgggtcccaggtatgctcccacctccacctgccccactcaccacctctgctagttccagacacctccgagacgagg

SEQ ID NO: 312 - RNA, 7582 nt, synthetic construct
  misc_feature 1..7582: note = V60 mRNA
  source 1..7582: mol_type = other RNA
aggactcactatttgttttcgcgcccagttgcaaaaagtgtcgacatttgcttctgacacaactgtgttcactagcaacctcaaacagacaccgccaccatgcctgctgctaagagagtgaaactggatggatcccggacactggtgaccttcaaggatgtatttgtggacttcaccagggaggagtggaagctgctggacactgctcagcagatcgtgtacagaaatgtgatgctggagaactataagaacctggtttccttgggttatcagcttactaagccagatgtgatcctccggttggagaagggagaagagcccggagggccgagctctggcgcacccccaccaagtggagggtctcctgccgggtccccaacatctactgaagaaggcaccagcgaatccgcaacgcccgagtcaggccctggtacctccacagaaccatctgaaggtagtgcgcctggttccccagctggaagccctacttccaccgaagaaggcacgtcaaccgaaccaagtgaaggatctgcccctgggaccagcactgaaccatctgagatgaaccatgaccaggaatttgaccccccaaaggtttacccacctgtgccagctgagaagaggaagcccatccgcgtgctgtctctctttgatgggattgctacagggctcctggtgctgaaggacctgggcatccaagtggaccgctacattgcctccgaggtgtgtgaggactccatcacggtgggcatggtgcggcaccagggaaagatcatgtacgtcggggacgtccgcagcgtcacacagaagcatatccaggagtggggcccattcgacctggtgattggaggcagtccctgcaatgacctctccattgtcaaccctgcccgcaagggactttatgagggtactggccgcctcttctttgagttctaccgcctcctgcatgatgcgcggcccaaggagggagatgatcgccccttcttctggctctttgagaatgtggtggccatgggcgttagtgacaagagggacatctcgcgatttcttgagtctaaccccgtgatgattgacgccaaagaagtgtctgctgcacacagggcccgttacttctggggtaaccttcctggcatgaacaggcctttggcatccactgtgaatgataagctggagctgcaagagtgtctggagcacggcagaatagccaagttcagcaaagtgaggaccattaccaccaggtcaaactctataaagcagggcaaagaccagcatttccccgtcttcatgaacgagaaggaggacatcctgtggtgcactgaaatggaaagggtgtttggcttccccgtccactacacagacgtctccaacatgagccgcttggcgaggcagagactgctgggccgatcgtggagcgtgccggtcatccgccacctcttcgctccgctgaaggaatattttgcttgtgtgggagggccgagctctggcgcacccccaccaagtggagggtctcctgccgggtccccaacatctactgaagaaggcaccagcgaatccgcaacgcccgagtcaggccctggtacctccacagaaccatctgaaggtagtgcgcctggttccccagctggaagccctacttccaccgaagaaggcacgtcaaccgaaccaagtgaaggatctgcccctgggaccagcactgaaccatctgagccaaaaaagaagagaaaggtaatggacaagaagtacagcatcggcctggccatcggcaccaactctgtgggctgggccgtgatcaccgacgagtacaaggtgcccagcaagaaattcaaggtgctgggcaacaccgaccggcacagcatcaagaagaacctgatcggcgccctgctgttcgacagcggagaaacagccgaggccacccggctgaagagaaccgccagaagaagatacaccagacggaagaaccggatctgctatctgcaagagatcttcagcaacgagatggccaaggtggacgacagcttcttccacagactggaagagtccttcctggtggaagaggataagaagcacgagcggcaccccatcttcggcaacatcgtggacgaggtggcctaccacgagaagtaccccaccatctaccacctgagaaagaaactggtggacagcaccgacaaggccgacctgcggctgatctatctggccctggcccacatgatcaagttccggggccacttcctgatcgagggcgacctgaaccccgacaacagcgacgtggacaagctgttcatccagctggtgcagacctacaaccagctgttcgaggaaaaccccatcaacgccagcggcgtggacgccaaggccatcctgtctgccagactgagcaagagcagacggctggaaaatctgatcgcccagctgcccggcgagaagaagaatggcctgttcggcaacctgattgccctgagcctgggcctgacccccaacttcaagagcaacttcgacctggccgaggatgccaaactgcagctgagcaaggacacctacgacgacgacctggacaacctgctggcccagatcggcgaccagtacgccgacctgtttctggccgccaagaacctgtccgacgccatcctgctgagcgacatcctgagagtgaacaccgagatcaccaaggcccccctgagcgcctctatgatcaagagatacgacgagcaccaccaggacctgaccctgctgaaagctctcgtgcggcagcagctgcctgagaagtacaaagagattttcttcgaccagagcaagaacggctacgccggctacatcgatggcggagccagccaggaagagttctacaagttcatcaagcccatcctggaaaagatggacggcaccgaggaactgctcgtgaagctgaacagagaggacctgctgcggaagcagcggaccttcgacaacggcagcatcccccaccagatccacctgggagagctgcacgccattctgcggcggcaggaagatttttacccattcctgaaggacaaccgggaaaagatcgagaagatcctgaccttccgcatcccctactacgtgggccctctggccaggggaaacagcagattcgcctggatgaccagaaagagcgaggaaaccatcaccccctggaacttcgaggaagtggtggacaagggcgccagcgcccagagcttcatcgagcggatgaccaacttcgataagaacctgcccaacgagaaggtgctgcccaagcacagcctgctgtacgagtacttcaccgtgtacaacgagctgaccaaagtgaaatacgtgaccgagggaatgagaaagcccgccttcctgagcggcgagcagaaaaaagccatcgtggacctgctgttcaagaccaaccggaaagtgaccgtgaagcagctgaaagaggactacttcaagaaaatcgagtgcttcgactccgtggaaatctccggcgtggaagatcggttcaacgcctccctgggcacataccacgatctgctgaaaattatcaaggacaaggacttcctggacaatgaggaaaacgaggacattctggaagatatcgtgctgaccctgacactgtttgaggacagagagatgatcgaggaacggctgaaaacctatgcccacctgttcgacgacaaagtgatgaagcagctgaagcggcggagatacaccggctggggcaggctgagccggaagctgatcaacggcatccgggacaagcagtccggcaagacaatcctggatttcctgaagtccgacggcttcgccaacagaaacttcatgcagctgatccacgacgacagcctgacctttaaagaggacatccagaaagcccaggtgtccggccagggcgatagcctgcacgagcacattgccaatctggccggcagccccgccattaagaagggcatcctgcagacagtgaaggtggtggacgagctcgtgaaagtgatgggccggcacaagcccgagaacatcgtgatcgaaatggccagagagaaccagaccacccagaagggacagaagaacagccgcgagagaatgaagcggatcgaagagggcatcaaagagctgggcagccagatcctgaaagaacaccccgtggaaaacacccagctgcagaacgagaagctgtacctgtactacctgcagaatgggcgggatatgtacgtggaccaggaactggacatcaaccggctgtccgactacgatgtggacgctatcgtgcctcagagctttctgaaggacgactccatcgataacaaagtgctgactcggagcgacaagaaccggggcaagagcgacaacgtgccctccgaagaggtcgtgaagaagatgaagaactactggcgccagctgctgaatgccaagctgattacccagaggaagttcgacaatctgaccaaggccgagagaggcggcctgagcgaactggataaggccggcttcatcaagagacagctggtggaaacccggcagatcacaaagcacgtggcacagatcctggactcccggatgaacactaagtacgacgagaacgacaaactgatccgggaagtgaaagtgatcaccctgaagtccaagctggtgtccgatttccggaaggatttccagttttacaaagtgcgcgagatcaacaactaccaccacgcccacgacgcctacctgaacgccgtcgtgggaaccgccctgatcaaaaagtaccctaagctggaaagcgagttcgtgtacggcgactacaaggtgtacgacgtgcggaagatgatcgccaagagcgagcaggaaatcggcaaggctaccgccaagtacttcttctacagcaacatcatgaactttttcaagaccgagattaccctggccaacggcgagatccggaagcggcctctgatcgagacaaacggcgaaacaggcgagatcgtgtgggataagggccgggactttgccaccgtgcggaaagtgctgtctatgccccaagtgaatatcgtgaaaaagaccgaggtgcagacaggcggcttcagcaaagagtctatcctgcccaagaggaacagcgacaagctgatcgccagaaagaaggactgggaccctaagaagtacggcggcttcgacagccccaccgtggcctattctgtgctggtggtggccaaagtggaaaagggcaagtccaagaaactgaagagtgtgaaagagctgctggggatcaccatcatggaaagaagcagcttcgagaagaatcccatcgactttctggaagccaagggctacaaagaagtgaaaaaggacctgatcatcaagctgcctaagtactccctgttcgagctggaaaacggccggaagagaatgctggcctctgccggcgaactgcagaagggaaacgaactggccctgccctccaaatatgtgaacttcctgtacctggccagccactatgagaagctgaagggctcccccgaggataatgagcagaaacagctgtttgtggaacagcacaaacactacctggacgagatcatcgagcagatcagcgagttctccaagagagtgatcctggccgacgctaatctggacaaggtgctgagcgcctacaacaagcacagagacaagcctatcagagagcaggccgagaatatcatccacctgtttaccctgaccaatctgggagcccctgccgccttcaagtactttgacaccaccatcgaccggaagaggtacaccagcaccaaagaggtgctggacgccaccctgatccaccagagcatcaccggcctgtacgagacacggatcgacctgtctcagctgggaggcgacgcctatccctatgacgtgcccgattatgccagcctgggcagcggctcccccaagaaaaaacgcaaggtggaagatcctaagaaaaagcggaaagtggacggcagcggcagcgagacccccggtaccagcgagagcgccacccccgagagccggacactcgccaagaccgtggcctatttctacgaccccgacgtgggcaacttccactacggagctggacaccctatgaagccccatcgcctggcattgacccatagcctggtcctgcattacggtctctataagaagatgatcgtcttcaagccataccaggcctcccaacatgacatgtgccgcttccactccgaggactacattgacttcctgcagagagtcagccccaccaatatgcaaggcttcaccaagagtcttaatgccttcaacgtaggcgatgactgcccagtgtttcccgggctctttgagttctgctcgcgttacacaggcgcatctctgcaaggagcaacccagctgaacaacaagatctgtgatattgccattaactgggctggtggtctgcaccatgccaagaagtttgaggcctctggcttctgctatgtcaacgacattgtgattggcatcctggagctgctcaagtaccaccctcgggtgctctacattgacattgacatccaccatggtgacggggttcaagaagctttctacctcactgaccgggtcatgacggtgtccttccacaaatacggaaattacttcttccctggcacaggtgacatgtatgaagtcggggcagagagtggccgctactactgtctgaacgtgcccctgcgggatggcattgatgaccagagttacaagcaccttttccagccggttatcaaccaggtagtggacttctaccaacccacgtgcattgtgctccagtgtggagctgactctctgggctgtgatcgattgggctgctttaacctcagcatccgagggcatggggaatgcgttgaatatgtcaagagcttcaatatccctctactcgtgctgggtggtggtggttatactgtccgaaatgttgcccgctgctggacatatgagacatcgctgctggtagaagaggccattagtgaggagcttccctatagtgaatacttcgagtactttgccccagacttcacacttcatccagatgtcagcacccgcatcgagaatcagaactcacgccagtatctggaccagatccgccagacaatctttgaaaacctgaagatgctgaaccatgcacctagtgtccagattcatgacgtgcctgcagacctcctgacctatgacaggactgatgaggctgatgcagaggagaggggtcctgaggagaactatagcaggccagaggcacccaatgagttctatgatggagaccatgacaatgacaaggaaagcgatgtggagattgagggcagcggctaatgagatcccaagcacgcagcaatgcagctcaaaacgcttagcctagccacacccccacgggaaacagcagtgattaacctttagcaataaacgaaagtttaactaagctatactaaccccagggttggtcaatttcgtgccagccacaccctggtactgcatgcacgcaatgctagctgcccctttcccgtcctgggcaccccgagtctcccccgaccccgggtcccaggtatgctcccacctccacctgccccactcaccacctctgctagttccagacacctccgagacgagg

SEQ ID NO: 313 - RNA, 8122 nt, synthetic construct
  misc_feature 1..8122: note = V61 mRNA
  source 1..8122: mol_type = other RNA
aggactcactatttgttttcgcgcccagttgcaaaaagtgtcgacatttgcttctgacacaactgtgttcactagcaacctcaaacagacaccgccaccatgcctgctgctaagagagtgaaactggatggatccaaccatgaccaggaatttgaccccccaaaggtttacccacctgtgccagctgagaagaggaagcccatccgcgtgctgtctctctttgatgggattgctacagggctcctggtgctgaaggacctgggcatccaagtggaccgctacattgcctccgaggtgtgtgaggactccatcacggtgggcatggtgcggcaccagggaaagatcatgtacgtcggggacgtccgcagcgtcacacagaagcatatccaggagtggggcccattcgacctggtgattggaggcagtccctgcaatgacctctccattgtcaaccctgcccgcaagggactttatgagggtactggccgcctcttctttgagttctaccgcctcctgcatgatgcgcggcccaaggagggagatgatcgccccttcttctggctctttgagaatgtggtggccatgggcgttagtgacaagagggacatctcgcgatttcttgagtctaaccccgtgatgattgacgccaaagaagtgtctgctgcacacagggcccgttacttctggggtaaccttcctggcatgaacaggcctttggcatccactgtgaatgataagctggagctgcaagagtgtctggagcacggcagaatagccaagttcagcaaagtgaggaccattaccaccaggtcaaactctataaagcagggcaaagaccagcatttccccgtgttcatgaacgagaaggaggacatcctgtggtgcactgaaatggaaagggtgtttggcttccccgtccactacacagacgtctccaacatgagccgcttggcgaggcagagactgctgggccgatcgtggagcgtgccggtcatccgccacctcttcgctccgctgaaggaatattttgcttgtgtgtctagcggcaatagtaacgctaacagccgcgggccgagcttcagcagcggcctggtgccgttaagcttgcgcggcagccatatgggccctatggagatatacaagacagtgtctgcatggaagagacagccagtgcgggtactgagcctcttcagaaacatcgacaaggtactaaagagtttgggcttcttggaaagcggttctggttctgggggaggaacgctgaagtacgtggaagatgtcacaaatgtcgtgaggagagacgtggagaaatggggcccctttgacctggtgtacggctcgacgcagcccctaggcagctcttgtgatcgctgtcccggctggtacatgttccagttccaccggatcctgcagtatgcgctgcctcgccaggagagtcagcggcccttcttctggatattcatggacaatctgctgctgactgaggatgaccaagagacaactacccgcttccttcagacagaggctgtgaccctccaggatgtccgtggcagagactaccagaatgctatgcgggtgtggagcaacattccagggctgaagagcaagcatgcgcccctgaccccaaaggaagaagagtatctgcaagcccaagtcagaagcaggagcaagctggacgccccgaaagttgacctcctggtgaagaactgccttctcccgctgagagagtacttcaagtatttttctcaaaactcacttcctcttggagggccgagctctggcgcacccccaccaagtggagggtctcctgccgggtccccaacatctactgaagaaggcaccagcgaatccgcaacgcccgagtcaggccctggtacctccacagaaccatctgaaggtagtgcgcctggttccccagctggaagccctacttccaccgaagaaggcacgtcaaccgaaccaagtgaaggatctgcccctgggaccagcactgaaccatctgagccaaaaaagaagagaaaggtaatggacaagaagtacagcatcggcctggccatcggcaccaactctgtgggctgggccgtgatcaccgacgagtacaaggtgcccagcaagaaattcaaggtgctgggcaacaccgaccggcacagcatcaagaagaacctgatcggcgccctgctgttcgacagcggagaaacagccgaggccacccggctgaagagaaccgccagaagaagatacaccagacggaagaaccggatctgctatctgcaagagatcttcagcaacgagatggccaaggtggacgacagcttcttccacagactggaagagtccttcctggtggaagaggataagaagcacgagcggcaccccatcttcggcaacatcgtggacgaggtggcctaccacgagaagtaccccaccatctaccacctgagaaagaaactggtggacagcaccgacaaggccgacctgcggctgatctatctggccctggcccacatgatcaagttccggggccacttcctgatcgagggcgacctgaaccccgacaacagcgacgtggacaagctgttcatccagctggtgcagacctacaaccagctgttcgaggaaaaccccatcaacgccagcggcgtggacgccaaggccatcctgtctgccagactgagcaagagcagacggctggaaaatctgatcgcccagctgcccggcgagaagaagaatggcctgttcggcaacctgattgccctgagcctgggcctgacccccaacttcaagagcaacttcgacctggccgaggatgccaaactgcagctgagcaaggacacctacgacgacgacctggacaacctgctggcccagatcggcgaccagtacgccgacctgtttctggccgccaagaacctgtccgacgccatcctgctgagcgacatcctgagagtgaacaccgagatcaccaaggcccccctgagcgcctctatgatcaagagatacgacgagcaccaccaggacctgaccctgctgaaagctctcgtgcggcagcagctgcctgagaagtacaaagagattttcttcgaccagagcaagaacggctacgccggctacatcgatggcggagccagccaggaagagttctacaagttcatcaagcccatcctggaaaagatggacggcaccgaggaactgctcgtgaagctgaacagagaggacctgctgcggaagcagcggaccttcgacaacggcagcatcccccaccagatccacctgggagagctgcacgccattctgcggcggcaggaagatttttacccattcctgaaggacaaccgggaaaagatcgagaagatcctgaccttccgcatcccctactacgtgggccctctggccaggggaaacagcagattcgcctggatgaccagaaagagcgaggaaaccatcaccccctggaacttcgaggaagtggtggacaagggcgccagcgcccagagcttcatcgagcggatgaccaacttcgataagaacctgcccaacgagaaggtgctgcccaagcacagcctgctgtacgagtacttcaccgtgtacaacgagctgaccaaagtgaaatacgtgaccgagggaatgagaaagcccgccttcctgagcggcgagcagaaaaaagccatcgtggacctgctgttcaagaccaaccggaaagtgaccgtgaagcagctgaaagaggactacttcaagaaaatcgagtgcttcgactccgtggaaatctccggcgtggaagatcggttcaacgcctccctgggcacataccacgatctgctgaaaattatcaaggacaaggacttcctggacaatgaggaaaacgaggacattctggaagatatcgtgctgaccctgacactgtttgaggacagagagatgatcgaggaacggctgaaaacctatgcccacctgttcgacgacaaagtgatgaagcagctgaagcggcggagatacaccggctggggcaggctgagccggaagctgatcaacggcatccgggacaagcagtccggcaagacaatcctggatttcctgaagtccgacggcttcgccaacagaaacttcatgcagctgatccacgacgacagcctgacctttaaagaggacatccagaaagcccaggtgtccggccagggcgatagcctgcacgagcacattgccaatctggccggcagccccgccattaagaagggcatcctgcagacagtgaaggtggtggacgagctcgtgaaagtgatgggccggcacaagcccgagaacatcgtgatcgaaatggccagagagaaccagaccacccagaagggacagaagaacagccgcgagagaatgaagcggatcgaagagggcatcaaagagctgggcagccagatcctgaaagaacaccccgtggaaaacacccagctgcagaacgagaagctgtacctgtactacctgcagaatgggcgggatatgtacgtggaccaggaactggacatcaaccggctgtccgactacgatgtggacgctatcgtgcctcagagctttctgaaggacgactccatcgataacaaagtgctgactcggagcgacaagaaccggggcaagagcgacaacgtgccctccgaagaggtcgtgaagaagatgaagaactactggcgccagctgctgaatgccaagctgattacccagaggaagttcgacaatctgaccaaggccgagagaggcggcctgagcgaactggataaggccggcttcatcaagagacagctggtggaaacccggcagatcacaaagcacgtggcacagatcctggactcccggatgaacactaagtacgacgagaacgacaaactgatccgggaagtgaaagtgatcaccctgaagtccaagctggtgtccgatttccggaaggatttccagttttacaaagtgcgcgagatcaacaactaccaccacgcccacgacgcctacctgaacgccgtcgtgggaaccgccctgatcaaaaagtaccctaagctggaaagcgagttcgtgtacggcgactacaaggtgtacgacgtgcggaagatgatcgccaagagcgagcaggaaatcggcaaggctaccgccaagtacttcttctacagcaacatcatgaactttttcaagaccgagattaccctggccaacggcgagatccggaagcggcctctgatcgagacaaacggcgaaacaggcgagatcgtgtgggataagggccgggactttgccaccgtgcggaaagtgctgtctatgccccaagtgaatatcgtgaaaaagaccgaggtgcagacaggcggcttcagcaaagagtctatcctgcccaagaggaacagcgacaagctgatcgccagaaagaaggactgggaccctaagaagtacggcggcttcgacagccccaccgtggcctattctgtgctggtggtggccaaagtggaaaagggcaagtccaagaaactgaagagtgtgaaagagctgctggggatcaccatcatggaaagaagcagcttcgagaagaatcccatcgactttctggaagccaagggctacaaagaagtgaaaaaggacctgatcatcaagctgcctaagtactccctgttcgagctggaaaacggccggaagagaatgctggcctctgccggcgaactgcagaagggaaacgaactggccctgccctccaaatatgtgaacttcctgtacctggccagccactatgagaagctgaagggctcccccgaggataatgagcagaaacagctgtttgtggaacagcacaaacactacctggacgagatcatcgagcagatcagcgagttctccaagagagtgatcctggccgacgctaatctggacaaggtgctgagcgcctacaacaagcacagagacaagcctatcagagagcaggccgagaatatcatccacctgtttaccctgaccaatctgggagcccctgccgccttcaagtactttgacaccaccatcgaccggaagaggtacaccagcaccaaagaggtgctggacgccaccctgatccaccagagcatcaccggcctgtacgagacacggatcgacctgtctcagctgggaggcgacgcctatccctatgacgtgcccgattatgccagcctgggcagcggctcccccaagaaaaaacgcaaggtggaagatcctaagaaaaagcggaaagtggacggcagcggcagcgagacccccggtaccagcgagagcgccacccccgagagcatggaccaaatgccaaatctgttcagagggagcaaagcttgcattcatttcatacgctcttctgtcgacgatgttttaagtatgactgcttcctacatcgtaagtgcagttattccttccatgcaacacccaacacatataagaggaagaacacagaaacagctttggacaacaagccttgtggaccacagtgttaccagcatctgccactcctacctaggaactaagtgggtatatattgcctgttggattttggacagaagattcaatgaatggcacctacagaaggagggagctaaggagtttgctgctgctcttactgctgagcgtataaagacaccacctaaacgcccagggggccgcagaagaggaagacttccgaataacagtagcagacccagcacccccaccatcagtgtgctggagtcaaaggatacagacagtgacagagaagcagggactgaaactgggggagagaacaatgataaagaagaagaagagaaaaaagatgagacgtccagctcctctgaagcaaattctcggtgtcaaacaccaataaagatgaagccaaatattgaacctcctgagaatgtggagtggagtggtgctgaagcctccatgtttagagtcctcattggtacttactacgataacttttgtgccattgctaggctaattgggaccaaaacatgtagacaggtgtatgagtttagagtcaaggagtccagtatcatagcacctgttcccactgaggatgtagacactcctccaagaaagaagaaaaggaaacatcggttgtgggctgcacactgcagaaagatacaactgaaaaaggacggctcctctaaccatgtttacaactatcaaccctgtgaccatccacggcagccttgtgacagttcgtgcccttgtgtgatagcacaaaatttttgtgaaaagttttgtcaatgtagttcagagtgtcaaaaccgctttcctggatgtcggtgcaaagcacaatgcaacaccaaacagtgtccatgctacctggctgtccgagagtgtgaccctgacctctgtctcacgtgtggagctgctgaccattgggacagtaaaaatgtatcctgtaagaactgtagcattcagcggggctctaaaaagcacttactgctggcaccgtctgatgtggcaggctggggcatctttatcaaagatcctgtacagaaaaatgaattcatctcagaatactgtggggagattatttctcaggatgaagcagacagaagaggaaaagtgtatgacaaatacatgtgcagctttctgttcaacttgaacaatgattttgtggtggatgcaacccgaaagggcaacaaaattcgttttgctaatcattcagtaaatccaaactgctatgcaaaagttatgatggttaatggtgaccacaggataggcatctttgctaagagggctatccagactggtgaagagttgttttttgattacagatacagccaggctgatgccctgaagtatgtgggcatcgaacgagaaatggaaatcccttgatagtgagatcccaagcacgcagcaatgcagctcaaaacgcttagcctagccacacccccacgggaaacagcagtgattaacctttagcaataaacgaaagtttaactaagctatactaaccccagggttggtcaatttcgtgccagccacaccctggtactgcatgcacgcaatgctagctgcccctttcccgtcctgggcaccccgagtctcccccgaccccgggtcccaggtatgctcccacctccacctgccccactcaccacctctgctagttccagacacctccgagacgagg

SEQ ID NO: 314 - RNA, 8833 nt, synthetic construct
  misc_feature 1..8833: note = V62 mRNA
  source 1..8833: mol_type = other RNA
aggactcactatttgttttcgcgcccagttgcaaaaagtgtcgacatttgcttctgacacaactgtgttcactagcaacctcaaacagacaccgccaccatgcctgctgctaagagagtgaaactggatggatccaaccatgaccaggaatttgaccccccaaaggtttacccacctgtgccagctgagaagaggaagcccatccgcgtgctgtctctctttgatgggattgctacagggctcctggtgctgaaggacctgggcatccaagtggaccgctacattgcctccgaggtgtgtgaggactccatcacggtgggcatggtgcggcaccagggaaagatcatgtacgtcggggacgtccgcagcgtcacacagaagcatatccaggagtggggcccattcgacctggtgattggaggcagtccctgcaatgacctctccattgtcaaccctgcccgcaagggactttatgagggtactggccgcctcttctttgagttctaccgcctcctgcatgatgcgcggcccaaggagggagatgatcgccccttcttctggctctttgagaatgtggtggccatgggcgttagtgacaagagggacatctcgcgatttcttgagtctaaccccgtgatgattgacgccaaagaagtgtctgctgcacacagggcccgttacttctggggtaaccttcctggcatgaacaggcctttggcatccactgtgaatgataagctggagctgcaagagtgtctggagcacggcagaatagccaagttcagcaaagtgaggaccattaccaccaggtcaaactctataaagcagggcaaagaccagcatttccccgtgttcatgaacgagaaggaggacatcctgtggtgcactgaaatggaaagggtgtttggcttccccgtccactacacagacgtctccaacatgagccgcttggcgaggcagagactgctgggccgatcgtggagcgtgccggtcatccgccacctcttcgctccgctgaaggaatattttgcttgtgtgtctagcggcaatagtaacgctaacagccgcgggccgagcttcagcagcggcctggtgccgttaagcttgcgcggcagccatatgggccctatggagatatacaagacagtgtctgcatggaagagacagccagtgcgggtactgagcctcttcagaaacatcgacaaggtactaaagagtttgggcttcttggaaagcggttctggttctgggggaggaacgctgaagtacgtggaagatgtcacaaatgtcgtgaggagagacgtggagaaatggggcccctttgacctggtgtacggctcgacgcagcccctaggcagctcttgtgatcgctgtcccggctggtacatgttccagttccaccggatcctgcagtatgcgctgcctcgccaggagagtcagcggcccttcttctggatattcatggacaatctgctgctgactgaggatgaccaagagacaactacccgcttccttcagacagaggctgtgaccctccaggatgtccgtggcagagactaccagaatgctatgcgggtgtggagcaacattccagggctgaagagcaagcatgcgcccctgaccccaaaggaagaagagtatctgcaagcccaagtcagaagcaggagcaagctggacgccccgaaagttgacctcctggtgaagaactgccttctcccgctgagagagtacttcaagtatttttctcaaaactcacttcctcttggagggccgagctctggcgcacccccaccaagtggagggtctcctgccgggtccccaacatctactgaagaaggcaccagcgaatccgcaacgcccgagtcaggccctggtacctccacagaaccatctgaaggtagtgcgcctggttccccagctggaagccctacttccaccgaagaaggcacgtcaaccgaaccaagtgaaggatctgcccctgggaccagcactgaaccatctgagccaaaaaagaagagaaaggtaatggacaagaagtacagcatcggcctggccatcggcaccaactctgtgggctgggccgtgatcaccgacgagtacaaggtgcccagcaagaaattcaaggtgctgggcaacaccgaccggcacagcatcaagaagaacctgatcggcgccctgctgttcgacagcggagaaacagccgaggccacccggctgaagagaaccgccagaagaagatacaccagacggaagaaccggatctgctatctgcaagagatcttcagcaacgagatggccaaggtggacgacagcttcttccacagactggaagagtccttcctggtggaagaggataagaagcacgagcggcaccccatcttcggcaacatcgtggacgaggtggcctaccacgagaagtaccccaccatctaccacctgagaaagaaactggtggacagcaccgacaaggccgacctgcggctgatctatctggccctggcccacatgatcaagttccggggccacttcctgatcgagggcgacctgaaccccgacaacagcgacgtggacaagctgttcatccagctggtgcagacctacaaccagctgttcgaggaaaaccccatcaacgccagcggcgtggacgccaaggccatcctgtctgccagactgagcaagagcagacggctggaaaatctgatcgcccagctgcccggcgagaagaagaatggcctgttcggcaacctgattgccctgagcctgggcctgacccccaacttcaagagcaacttcgacctggccgaggatgccaaactgcagctgagcaaggacacctacgacgacgacctggacaacctgctggcccagatcggcgaccagtacgccgacctgtttctggccgccaagaacctgtccgacgccatcctgctgagcgacatcctgagagtgaacaccgagatcaccaaggcccccctgagcgcctctatgatcaagagatacgacgagcaccaccaggacctgaccctgctgaaagctctcgtgcggcagcagctgcctgagaagtacaaagagattttcttcgaccagagcaagaacggctacgccggctacatcgatggcggagccagccaggaagagttctacaagttcatcaagcccatcctggaaaagatggacggcaccgaggaactgctcgtgaagctgaacagagaggacctgctgcggaagcagcggaccttcgacaacggcagcatcccccaccagatccacctgggagagctgcacgccattctgcggcggcaggaagatttttacccattcctgaaggacaaccgggaaaagatcgagaagatcctgaccttccgcatcccctactacgtgggccctctggccaggggaaacagcagattcgcctggatgaccagaaagagcgaggaaaccatcaccccctggaacttcgaggaagtggtggacaagggcgccagcgcccagagcttcatcgagcggatgaccaacttcgataagaacctgcccaacgagaaggtgctgcccaagcacagcctgctgtacgagtacttcaccgtgtacaacgagctgaccaaagtgaaatacgtgaccgagggaatgagaaagcccgccttcctgagcggcgagcagaaaaaagccatcgtggacctgctgttcaagaccaaccggaaagtgaccgtgaagcagctgaaagaggactacttcaagaaaatcgagtgcttcgactccgtggaaatctccggcgtggaagatcggttcaacgcctccctgggcacataccacgatctgctgaaaattatcaaggacaaggacttcctggacaatgaggaaaacgaggacattctggaagatatcgtgctgaccctgacactgtttgaggacagagagatgatcgaggaacggctgaaaacctatgcccacctgttcgacgacaaagtgatgaagcagctgaagcggcggagatacaccggctggggcaggctgagccggaagctgatcaacggcatccgggacaagcagtccggcaagacaatcctggatttcctgaagtccgacggcttcgccaacagaaacttcatgcagctgatccacgacgacagcctgacctttaaagaggacatccagaaagcccaggtgtccggccagggcgatagcctgcacgagcacattgccaatctggccggcagccccgccattaagaagggcatcctgcagacagtgaaggtggtggacgagctcgtgaaagtgatgggccggcacaagcccgagaacatcgtgatcgaaatggccagagagaaccagaccacccagaagggacagaagaacagccgcgagagaatgaagcggatcgaagagggcatcaaagagctgggcagccagatcctgaaagaacaccccgtggaaaacacccagctgcagaacgagaagctgtacctgtactacctgcagaatgggcgggatatgtacgtggaccaggaactggacatcaaccggctgtccgactacgatgtggacgctatcgtgcctcagagctttctgaaggacgactccatcgataacaaagtgctgactcggagcgacaagaaccggggcaagagcgacaacgtgccctccgaagaggtcgtgaagaagatgaagaactactggcgccagctgctgaatgccaagctgattacccagaggaagttcgacaatctgaccaaggccgagagaggcggcctgagcgaactggataaggccggcttcatcaagagacagctggtggaaacccggcagatcacaaagcacgtggcacagatcctggactcccggatgaacactaagtacgacgagaacgacaaactgatccgggaagtgaaagtgatcaccctgaagtccaagctggtgtccgatttccggaaggatttccagttttacaaagtgcgcgagatcaacaactaccaccacgcccacgacgcctacctgaacgccgtcgtgggaaccgccctgatcaaaaagtaccctaagctggaaagcgagttcgtgtacggcgactacaaggtgtacgacgtgcggaagatgatcgccaagagcgagcaggaaatcggcaaggctaccgccaagtacttcttctacagcaacatcatgaactttttcaagaccgagattaccctggccaacggcgagatccggaagcggcctctgatcgagacaaacggcgaaacaggcgagatcgtgtgggataagggccgggactttgccaccgtgcggaaagtgctgtctatgccccaagtgaatatcgtgaaaaagaccgaggtgcagacaggcggcttcagcaaagagtctatcctgcccaagaggaacagcgacaagctgatcgccagaaagaaggactgggaccctaagaagtacggcggcttcgacagccccaccgtggcctattctgtgctggtggtggccaaagtggaaaagggcaagtccaagaaactgaagagtgtgaaagagctgctggggatcaccatcatggaaagaagcagcttcgagaagaatcccatcgactttctggaagccaagggctacaaagaagtgaaaaaggacctgatcatcaagctgcctaagtactccctgttcgagctggaaaacggccggaagagaatgctggcctctgccggcgaactgcagaagggaaacgaactggccctgccctccaaatatgtgaacttcctgtacctggccagccactatgagaagctgaagggctcccccgaggataatgagcagaaacagctgtttgtggaacagcacaaacactacctggacgagatcatcgagcagatcagcgagttctccaagagagtgatcctggccgacgctaatctggacaaggtgctgagcgcctacaacaagcacagagacaagcctatcagagagcaggccgagaatatcatccacctgtttaccctgaccaatctgggagcccctgccgccttcaagtactttgacaccaccatcgaccggaagaggtacaccagcaccaaagaggtgctggacgccaccctgatccaccagagcatcaccggcctgtacgagacacggatcgacctgtctcagctgggaggcgacgcctatccctatgacgtgcccgattatgccagcctgggcagcggctcccccaagaaaaaacgcaaggtggaagatcctaagaaaaagcggaaagtggacggcagcggcagcgagacccccggtaccagcgagagcgccacccccgagagccggacactcggccagactgggaagaaatctgagaagggaccagtttgttggcggaagcgtgtaaaatcagagtacatgcgactgagacagctcaagaggttcagacgagctgatgaagtaaagagtatgtttagttccaatcgtcagaaaattttggaaagaacggaaatcttaaaccaagaatggaaacagcgaaggatacagcctgtgcacatcctgacttctgtgagctcattgcgcgggactagggagtgttcggtgaccagtgacttggattttccaacacaagtcatcccattaaagactctgaatgcagttgcttcagtacccataatgtattcttggtctcccctacagcagaattttatggtggaagatgaaactgttttacataacattccttatatgggagatgaagttttagatcaggatggtactttcattgaagaactaataaaaaattatgatgggaaagtacacggggatagagaatgtgggtttataaatgatgaaatttttgtggagttggtgaatgcccttggtcaatataatgatgatgacgatgatgatgatggagacgatcctgaagaaagagaagaaaagcagaaagatctggaggatcaccgagatgataaagaaagccgcccacctcggaaatttccttctgataaaatttttgaagccatttcctcaatgtttccagataagggcacagcagaagaactaaaggaaaaatataaagaactcaccgaacagcagctcccaggcgcacttcctcctgaatgtacccccaacatagatggaccaaatgctaaatctgttcagagagagcaaagcttacactcctttcatacgcttttctgtaggcgatgttttaaatatgactgcttcctacatccttttcatgcaacacccaacacttataagcggaagaacacagaaacagctctagacaacaaaccttgtggaccacagtgttaccagcatttggagggagcaaaggagtttgctgctgctctcaccgctgagcggataaagaccccaccaaaacgtccaggaggccgcagaagaggacggcttcccaataacagtagcaggcccagcacccccaccattaatgtgctggaatcaaaggatacagacagtgatagggaagcagggactgaaacggggggagagaacaatgataaagaagaagaagagaagaaagatgaaacttcgagctcctctgaagcaaattctcggtgtcaaacaccaataaagatgaagccaaatattgaacctcctgagaatgtggagtggagtggtgctgaagcctcaatgtttagagtcctcattggcacttactatgacaatttctgtgccattgctaggttaattgggaccaaaacatgtagacaggtgtatgagtttagagtcaaagaatctagcatcatagctccagctcccgctgaggatgtggatactcctccaaggaaaaagaagaggaaacaccggttgtgggctgcacactgcagaaagatacagctgaaaaaggacggctcctctaaccatgtttacaactatcaaccctgtgatcatccacggcagccttgtgacagttcgtgcccttgtgtgatagcacaaaatttttgtgaaaagttttgtcaatgtagttcagagtgtcaaaaccgctttccgggatgccgctgcaaagcacagtgcaacaccaagcagtgcccgtgctacctggctgtccgagagtgtgaccctgacctctgtcttacttgtggagccgctgaccattgggacagtaaaaatgtgtcctgcaagaactgcagtattcagcggggctccaaaaagcatctattgctggcaccatctgacgtggcaggctgggggatttttatcaaagatcctgtgcagaaaaatgaattcatctcagaatactgtggagagattatttctcaagatgaagctgacagaagagggaaagtgtatgataaatacatgtgcagctttctgttcaacttgaacaatgattttgtggtggatgcaacccgcaagggtaacaaaattcgttttgcaaatcattcggtaaatccaaactgctatgcaaaagttatgatggttaacggtgatcacaggataggtatttttgccaagagagccatccagactggcgaagagctgttttttgattacagatacagccaggctgatgccctgaagtatgtcggcatcgaaagagaaatggaaatccctgagggcagcggctaatgagatcccaagcacgcagcaatgcagctcaaaacgcttagcctagccacacccccacgggaaacagcagtgattaacctttagcaataaacgaaagtttaactaagctatactaaccccagggttggtcaatttcgtgccagccacaccctggtactgcatgcacgcaatgctagctgcccctttcccgtcctgggcaccccgagtctcccccgaccccgggtcccaggtatgctcccacctccacctgccccactcaccacctctgctagttccagacacctccgagacgagg

SEQ ID NO: 315 - RNA, 7390 nt, synthetic construct
  misc_feature 1..7390: note = V63 mRNA
  source 1..7390: mol_type = other RNA
aggactcactatttgttttcgcgcccagttgcaaaaagtgtcgacatttgcttctgacacaactgtgttcactagcaacctcaaacagacaccgccaccatgcctgctgctaagagagtgaaactggatggatccaaccatgaccaggaatttgaccccccaaaggtttacccacctgtgccagctgagaagaggaagcccatccgcgtgctgtctctctttgatgggattgctacagggctcctggtgctgaaggacctgggcatccaagtggaccgctacattgcctccgaggtgtgtgaggactccatcacggtgggcatggtgcggcaccagggaaagatcatgtacgtcggggacgtccgcagcgtcacacagaagcatatccaggagtggggcccattcgacctggtgattggaggcagtccctgcaatgacctctccattgtcaaccctgcccgcaagggactttatgagggtactggccgcctcttctttgagttctaccgcctcctgcatgatgcgcggcccaaggagggagatgatcgccccttcttctggctctttgagaatgtggtggccatgggcgttagtgacaagagggacatctcgcgatttcttgagtctaaccccgtgatgattgacgccaaagaagtgtctgctgcacacagggcccgttacttctggggtaaccttcctggcatgaacaggcctttggcatccactgtgaatgataagctggagctgcaagagtgtctggagcacggcagaatagccaagttcagcaaagtgaggaccattaccaccaggtcaaactctataaagcagggcaaagaccagcatttccccgtgttcatgaacgagaaggaggacatcctgtggtgcactgaaatggaaagggtgtttggcttccccgtccactacacagacgtctccaacatgagccgcttggcgaggcagagactgctgggccgatcgtggagcgtgccggtcatccgccacctcttcgctccgctgaaggaatattttgcttgtgtgtctagcggcaatagtaacgctaacagccgcgggccgagcttcagcagcggcctggtgccgttaagcttgcgcggcagccatatgggccctatggagatatacaagacagtgtctgcatggaagagacagccagtgcgggtactgagcctcttcagaaacatcgacaaggtactaaagagtttgggcttcttggaaagcggttctggttctgggggaggaacgctgaagtacgtggaagatgtcacaaatgtcgtgaggagagacgtggagaaatggggcccctttgacctggtgtacggctcgacgcagcccctaggcagctcttgtgatcgctgtcccggctggtacatgttccagttccaccggatcctgcagtatgcgctgcctcgccaggagagtcagcggcccttcttctggatattcatggacaatctgctgctgactgaggatgaccaagagacaactacccgcttccttcagacagaggctgtgaccctccaggatgtccgtggcagagactaccagaatgctatgcgggtgtggagcaacattccagggctgaagagcaagcatgcgcccctgaccccaaaggaagaagagtatctgcaagcccaagtcagaagcaggagcaagctggacgccccgaaagttgacctcctggtgaagaactgccttctcccgctgagagagtacttcaagtatttttctcaaaactcacttcctcttggagggccgagctctggcgcacccccaccaagtggagggtctcctgccgggtccccaacatctactgaagaaggcaccagcgaatccgcaacgcccgagtcaggccctggtacctccacagaaccatctgaaggtagtgcgcctggttccccagctggaagccctacttccaccgaagaaggcacgtcaaccgaaccaagtgaaggatctgcccctgggaccagcactgaaccatctgagccaaaaaagaagagaaaggtaatggacaagaagtacagcatcggcctggccatcggcaccaactctgtgggctgggccgtgatcaccgacgagtacaaggtgcccagcaagaaattcaaggtgctgggcaacaccgaccggcacagcatcaagaagaacctgatcggcgccctgctgttcgacagcggagaaacagccgaggccacccggctgaagagaaccgccagaagaagatacaccagacggaagaaccggatctgctatctgcaagagatcttcagcaacgagatggccaaggtggacgacagcttcttccacagactggaagagtccttcctggtggaagaggataagaagcacgagcggcaccccatcttcggcaacatcgtggacgaggtggcctaccacgagaagtaccccaccatctaccacctgagaaagaaactggtggacagcaccgacaaggccgacctgcggctgatctatctggccctggcccacatgatcaagttccggggccacttcctgatcgagggcgacctgaaccccgacaacagcgacgtggacaagctgttcatccagctggtgcagacctacaaccagctgttcgaggaaaaccccatcaacgccagcggcgtggacgccaaggccatcctgtctgccagactgagcaagagcagacggctggaaaatctgatcgcccagctgcccggcgagaagaagaatggcctgttcggcaacctgattgccctgagcctgggcctgacccccaacttcaagagcaacttcgacctggccgaggatgccaaactgcagctgagcaaggacacctacgacgacgacctggacaacctgctggcccagatcggcgaccagtacgccgacctgtttctggccgccaagaacctgtccgacgccatcctgctgagcgacatcctgagagtgaacaccgagatcaccaaggcccccctgagcgcctctatgatcaagagatacgacgagcaccaccaggacctgaccctgctgaaagctctcgtgcggcagcagctgcctgagaagtacaaagagattttcttcgaccagagcaagaacggctacgccggctacatcgatggcggagccagccaggaagagttctacaagttcatcaagcccatcctggaaaagatggacggcaccgaggaactgctcgtgaagctgaacagagaggacctgctgcggaagcagcggaccttcgacaacggcagcatcccccaccagatccacctgggagagctgcacgccattctgcggcggcaggaagatttttacccattcctgaaggacaaccgggaaaagatcgagaagatcctgaccttccgcatcccctactacgtgggccctctggccaggggaaacagcagattcgcctggatgaccagaaagagcgaggaaaccatcaccccctggaacttcgaggaagtggtggacaagggcgccagcgcccagagcttcatcgagcggatgaccaacttcgataagaacctgcccaacgagaaggtgctgcccaagcacagcctgctgtacgagtacttcaccgtgtacaacgagctgaccaaagtgaaatacgtgaccgagggaatgagaaagcccgccttcctgagcggcgagcagaaaaaagccatcgtggacctgctgttcaagaccaaccggaaagtgaccgtgaagcagctgaaagaggactacttcaagaaaatcgagtgcttcgactccgtggaaatctccggcgtggaagatcggttcaacgcctccctgggcacataccacgatctgctgaaaattatcaaggacaaggacttcctggacaatgaggaaaacgaggacattctggaagatatcgtgctgaccctgacactgtttgaggacagagagatgatcgaggaacggctgaaaacctatgcccacctgttcgacgacaaagtgatgaagcagctgaagcggcggagatacaccggctggggcaggctgagccggaagctgatcaacggcatccgggacaagcagtccggcaagacaatcctggatttcctgaagtccgacggcttcgccaacagaaacttcatgcagctgatccacgacgacagcctgacctttaaagaggacatccagaaagcccaggtgtccggccagggcgatagcctgcacgagcacattgccaatctggccggcagccccgccattaagaagggcatcctgcagacagtgaaggtggtggacgagctcgtgaaagtgatgggccggcacaagcccgagaacatcgtgatcgaaatggccagagagaaccagaccacccagaagggacagaagaacagccgcgagagaatgaagcggatcgaagagggcatcaaagagctgggcagccagatcctgaaagaacaccccgtggaaaacacccagctgcagaacgagaagctgtacctgtactacctgcagaatgggcgggatatgtacgtggaccaggaactggacatcaaccggctgtccgactacgatgtggacgctatcgtgcctcagagctttctgaaggacgactccatcgataacaaagtgctgactcggagcgacaagaaccggggcaagagcgacaacgtgccctccgaagaggtcgtgaagaagatgaagaactactggcgccagctgctgaatgccaagctgattacccagaggaagttcgacaatctgaccaaggccgagagaggcggcctgagcgaactggataaggccggcttcatcaagagacagctggtggaaacccggcagatcacaaagcacgtggcacagatcctggactcccggatgaacactaagtacgacgagaacgacaaactgatccgggaagtgaaagtgatcaccctgaagtccaagctggtgtccgatttccggaaggatttccagttttacaaagtgcgcgagatcaacaactaccaccacgcccacgacgcctacctgaacgccgtcgtgggaaccgccctgatcaaaaagtaccctaagctggaaagcgagttcgtgtacggcgactacaaggtgtacgacgtgcggaagatgatcgccaagagcgagcaggaaatcggcaaggctaccgccaagtacttcttctacagcaacatcatgaactttttcaagaccgagattaccctggccaacggcgagatccggaagcggcctctgatcgagacaaacggcgaaacaggcgagatcgtgtgggataagggccgggactttgccaccgtgcggaaagtgctgtctatgccccaagtgaatatcgtgaaaaagaccgaggtgcagacaggcggcttcagcaaagagtctatcctgcccaagaggaacagcgacaagctgatcgccagaaagaaggactgggaccctaagaagtacggcggcttcgacagccccaccgtggcctattctgtgctggtggtggccaaagtggaaaagggcaagtccaagaaactgaagagtgtgaaagagctgctggggatcaccatcatggaaagaagcagcttcgagaagaatcccatcgactttctggaagccaagggctacaaagaagtgaaaaaggacctgatcatcaagctgcctaagtactccctgttcgagctggaaaacggccggaagagaatgctggcctctgccggcgaactgcagaagggaaacgaactggccctgccctccaaatatgtgaacttcctgtacctggccagccactatgagaagctgaagggctcccccgaggataatgagcagaaacagctgtttgtggaacagcacaaacactacctggacgagatcatcgagcagatcagcgagttctccaagagagtgatcctggccgacgctaatctggacaaggtgctgagcgcctacaacaagcacagagacaagcctatcagagagcaggccgagaatatcatccacctgtttaccctgaccaatctgggagcccctgccgccttcaagtactttgacaccaccatcgaccggaagaggtacaccagcaccaaagaggtgctggacgccaccctgatccaccagagcatcaccggcctgtacgagacacggatcgacctgtctcagctgggaggcgacgcctatccctatgacgtgcccgattatgccagcctgggcagcggctcccccaagaaaaaacgcaaggtggaagatcctaagaaaaagcggaaagtggacggcagcggcagcgagacccccggtaccagcgagagcgccacccccgagagccggacactcgaggatgtggatactcctccaaggaaaaagaagaggaaacaccggttgtgggctgcacactgcagaaagatacagctgaaaaaggacggctcctctaaccatgtttacaactatcaaccctgtgatcatccacggcagccttgtgacagttcgtgcccttgtgtgatagcacaaaatttttgtgaaaagttttgtcaatgtagttcagagtgtcaaaaccgctttccgggatgccgctgcaaagcacagtgcaacaccaagcagtgcccgtgctacctggctgtccgagagtgtgaccctgacctctgtcttacttgtggagccgctgaccattgggacagtaaaaatgtgtcctgcaagaactgcagtattcagcggggctccaaaaagcatctattgctggcaccatctgacgtggcaggctgggggatttttatcaaagatcctgtgcagaaaaatgaattcatctcagaatactgtggagagattatttctcaagatgaagctgacagaagagggaaagtgtatgataaatacatgtgcagctttctgttcaacttgaacaatgattttgtggtggatgcaacccgcaagggtaacaaaattcgttttgcaaatcattcggtaaatccaaactgctatgcaaaagttatgatggttaacggtgatcacaggataggtatttttgccaagagagccatccagactggcgaagagctgttttttgattacagatacagccaggctgatgccctgaagtatgtcggcatcgaaagagaaatggaaatccctgagggcagcggctaatgagatcccaagcacgcagcaatgcagctcaaaacgcttagcctagccacacccccacgggaaacagcagtgattaacctttagcaataaacgaaagtttaactaagctatactaaccccagggttggtcaatttcgtgccagccacaccctggtactgcatgcacgcaatgctagctgcccctttcccgtcctgggcaccccgagtctcccccgaccccgggtcccaggtatgctcccacctccacctgccccactcaccacctctgctagttccagacacctccgagacgagg

SEQ ID NO: 316 - RNA, 7879 nt, synthetic construct
  misc_feature 1..7879: note = V64 mRNA
  source 1..7879: mol_type = other RNA
aggactcactatttgttttcgcgcccagttgcaaaaagtgtcgacatttgcttctgacacaactgtgttcactagcaacctcaaacagacaccgccaccatgcctgctgctaagagagtgaaactggatggatccaaccatgaccaggaatttgaccccccaaaggtttacccacctgtgccagctgagaagaggaagcccatccgcgtgctgtctctctttgatgggattgctacagggctcctggtgctgaaggacctgggcatccaagtggaccgctacattgcctccgaggtgtgtgaggactccatcacggtgggcatggtgcggcaccagggaaagatcatgtacgtcggggacgtccgcagcgtcacacagaagcatatccaggagtggggcccattcgacctggtgattggaggcagtccctgcaatgacctctccattgtcaaccctgcccgcaagggactttatgagggtactggccgcctcttctttgagttctaccgcctcctgcatgatgcgcggcccaaggagggagatgatcgccccttcttctggctctttgagaatgtggtggccatgggcgttagtgacaagagggacatctcgcgatttcttgagtctaaccccgtgatgattgacgccaaagaagtgtctgctgcacacagggcccgttacttctggggtaaccttcctggcatgaacaggcctttggcatccactgtgaatgataagctggagctgcaagagtgtctggagcacggcagaatagccaagttcagcaaagtgaggaccattaccaccaggtcaaactctataaagcagggcaaagaccagcatttccccgtcttcatgaacgagaaggaggacatcctgtggtgcactgaaatggaaagggtgtttggcttccccgtccactacacagacgtctccaacatgagccgcttggcgaggcagagactgctgggccgatcgtggagcgtgccggtcatccgccacctcttcgctccgctgaaggaatattttgcttgtgtgtctagcggcaatagtaacgctaacagccgcgggccgagcttcagcagcggcctggtgccgttaagcttgcgcggcagccatatgggccctatggagatatacaagacagtgtctgcatggaagagacagccagtgcgggtactgagcctcttcagaaacatcgacaaggtactaaagagtttgggcttcttggaaagcggttctggttctgggggaggaacgctgaagtacgtggaagatgtcacaaatgtcgtgaggagagacgtggagaaatggggcccctttgacctggtgtacggctcgacgcagcccctaggcagctcttgtgatcgctgtcccggctggtacatgttccagttccaccggatcctgcagtatgcgctgcctcgccaggagagtcagcggcccttcttctggatattcatggacaatctgctgctgactgaggatgaccaagagacaactacccgcttccttcagacagaggctgtgaccctccaggatgtccgtggcagagactaccagaatgctatgcgggtgtggagcaacattccagggctgaagagcaagcatgcgcccctgaccccaaaggaagaagagtatctgcaagcccaagtcagaagcaggagcaagctggacgccccgaaagttgacctcctggtgaagaactgccttctcccgctgagagagtacttcaagtatttttctcaaaactcacttcctcttggagggccgagctctggcgcacccccaccaagtggagggtctcctgccgggtccccaacatctactgaagaaggcaccagcgaatccgcaacgcccgagtcaggccctggtacctccacagaaccatctgaaggtagtgcgcctggttccccagctggaagccctacttccaccgaagaaggcacgtcaaccgaaccaagtgaaggatctgcccctgggaccagcactgaaccatctgagccaaaaaagaagagaaaggtaatggacaagaagtacagcatcggcctggccatcggcaccaactctgtgggctgggccgtgatcaccgacgagtacaaggtgcccagcaagaaattcaaggtgctgggcaacaccgaccggcacagcatcaagaagaacctgatcggcgccctgctgttcgacagcggagaaacagccgaggccacccggctgaagagaaccgccagaagaagatacaccagacggaagaaccggatctgctatctgcaagagatcttcagcaacgagatggccaaggtggacgacagcttcttccacagactggaagagtccttcctggtggaagaggataagaagcacgagcggcaccccatcttcggcaacatcgtggacgaggtggcctaccacgagaagtaccccaccatctaccacctgagaaagaaactggtggacagcaccgacaaggccgacctgcggctgatctatctggccctggcccacatgatcaagttccggggccacttcctgatcgagggcgacctgaaccccgacaacagcgacgtggacaagctgttcatccagctggtgcagacctacaaccagctgttcgaggaaaaccccatcaacgccagcggcgtggacgccaaggccatcctgtctgccagactgagcaagagcagacggctggaaaatctgatcgcccagctgcccggcgagaagaagaatggcctgttcggcaacctgattgccctgagcctgggcctgacccccaacttcaagagcaacttcgacctggccgaggatgccaaactgcagctgagcaaggacacctacgacgacgacctggacaacctgctggcccagatcggcgaccagtacgccgacctgtttctggccgccaagaacctgtccgacgccatcctgctgagcgacatcctgagagtgaacaccgagatcaccaaggcccccctgagcgcctctatgatcaagagatacgacgagcaccaccaggacctgaccctgctgaaagctctcgtgcggcagcagctgcctgagaagtacaaagagattttcttcgaccagagcaagaacggctacgccggctacatcgatggcggagccagccaggaagagttctacaagttcatcaagcccatcctggaaaagatggacggcaccgaggaactgctcgtgaagctgaacagagaggacctgctgcggaagcagcggaccttcgacaacggcagcatcccccaccagatccacctgggagagctgcacgccattctgcggcggcaggaagatttttacccattcctgaaggacaaccgggaaaagatcgagaagatcctgaccttccgcatcccctactacgtgggccctctggccaggggaaacagcagattcgcctggatgaccagaaagagcgaggaaaccatcaccccctggaacttcgaggaagtggtggacaagggcgccagcgcccagagcttcatcgagcggatgaccaacttcgataagaacctgcccaacgagaaggtgctgcccaagcacagcctgctgtacgagtacttcaccgtgtacaacgagctgaccaaagtgaaatacgtgaccgagggaatgagaaagcccgccttcctgagcggcgagcagaaaaaagccatcgtggacctgctgttcaagaccaaccggaaagtgaccgtgaagcagctgaaagaggactacttcaagaaaatcgagtgcttcgactccgtggaaatctccggcgtggaagatcggttcaacgcctccctgggcacataccacgatctgctgaaaattatcaaggacaaggacttcctggacaatgaggaaaacgaggacattctggaagatatcgtgctgaccctgacactgtttgaggacagagagatgatcgaggaacggctgaaaacctatgcccacctgttcgacgacaaagtgatgaagcagctgaagcggcggagatacaccggctggggcaggctgagccggaagctgatcaacggcatccgggacaagcagtccggcaagacaatcctggatttcctgaagtccgacggcttcgccaacagaaacttcatgcagctgatccacgacgacagcctgacctttaaagaggacatccagaaagcccaggtgtccggccagggcgatagcctgcacgagcacattgccaatctggccggcagccccgccattaagaagggcatcctgcagacagtgaaggtggtggacgagctcgtgaaagtgatgggccggcacaagcccgagaacatcgtgatcgaaatggccagagagaaccagaccacccagaagggacagaagaacagccgcgagagaatgaagcggatcgaagagggcatcaaagagctgggcagccagatcctgaaagaacaccccgtggaaaacacccagctgcagaacgagaagctgtacctgtactacctgcagaatgggcgggatatgtacgtggaccaggaactggacatcaaccggctgtccgactacgatgtggacgctatcgtgcctcagagctttctgaaggacgactccatcgataacaaagtgctgactcggagcgacaagaaccggggcaagagcgacaacgtgccctccgaagaggtcgtgaagaagatgaagaactactggcgccagctgctgaatgccaagctgattacccagaggaagttcgacaatctgaccaaggccgagagaggcggcctgagcgaactggataaggccggcttcatcaagagacagctggtggaaacccggcagatcacaaagcacgtggcacagatcctggactcccggatgaacactaagtacgacgagaacgacaaactgatccgggaagtgaaagtgatcaccctgaagtccaagctggtgtccgatttccggaaggatttccagttttacaaagtgcgcgagatcaacaactaccaccacgcccacgacgcctacctgaacgccgtcgtgggaaccgccctgatcaaaaagtaccctaagctggaaagcgagttcgtgtacggcgactacaaggtgtacgacgtgcggaagatgatcgccaagagcgagcaggaaatcggcaaggctaccgccaagtacttcttctacagcaacatcatgaactttttcaagaccgagattaccctggccaacggcgagatccggaagcggcctctgatcgagacaaacggcgaaacaggcgagatcgtgtgggataagggccgggactttgccaccgtgcggaaagtgctgtctatgccccaagtgaatatcgtgaaaaagaccgaggtgcagacaggcggcttcagcaaagagtctatcctgcccaagaggaacagcgacaagctgatcgccagaaagaaggactgggaccctaagaagtacggcggcttcgacagccccaccgtggcctattctgtgctggtggtggccaaagtggaaaagggcaagtccaagaaactgaagagtgtgaaagagctgctggggatcaccatcatggaaagaagcagcttcgagaagaatcccatcgactttctggaagccaagggctacaaagaagtgaaaaaggacctgatcatcaagctgcctaagtactccctgttcgagctggaaaacggccggaagagaatgctggcctctgccggcgaactgcagaagggaaacgaactggccctgccctccaaatatgtgaacttcctgtacctggccagccactatgagaagctgaagggctcccccgaggataatgagcagaaacagctgtttgtggaacagcacaaacactacctggacgagatcatcgagcagatcagcgagttctccaagagagtgatcctggccgacgctaatctggacaaggtgctgagcgcctacaacaagcacagagacaagcctatcagagagcaggccgagaatatcatccacctgtttaccctgaccaatctgggagcccctgccgccttcaagtactttgacaccaccatcgaccggaagaggtacaccagcaccaaagaggtgctggacgccaccctgatccaccagagcatcaccggcctgtacgagacacggatcgacctgtctcagctgggaggcgacgcctatccctatgacgtgcccgattatgccagcctgggcagcggctcccccaagaaaaaacgcaaggtggaagatcctaagaaaaagcggaaagtggacggcagcggcagcgagacccccggtaccagcgagagcgccacccccgagagccggacactcgccaagaccgtggcctatttctacgaccccgacgtgggcaacttccactacggagctggacaccctatgaagccccatcgcctggcattgacccatagcctggtcctgcattacggtctctataagaagatgatcgtcttcaagccataccaggcctcccaacatgacatgtgccgcttccactccgaggactacattgacttcctgcagagagtcagccccaccaatatgcaaggcttcaccaagagtcttaatgccttcaacgtaggcgatgactgcccagtgtttcccgggctctttgagttctgctcgcgttacacaggcgcatctctgcaaggagcaacccagctgaacaacaagatctgtgatattgccattaactgggctggtggtctgcaccatgccaagaagtttgaggcctctggcttctgctatgtcaacgacattgtgattggcatcctggagctgctcaagtaccaccctcgggtgctctacattgacattgacatccaccatggtgacggggttcaagaagctttctacctcactgaccgggtcatgacggtgtccttccacaaatacggaaattacttcttccctggcacaggtgacatgtatgaagtcggggcagagagtggccgctactactgtctgaacgtgcccctgcgggatggcattgatgaccagagttacaagcaccttttccagccggttatcaaccaggtagtggacttctaccaacccacgtgcattgtgctccagtgtggagctgactctctgggctgtgatcgattgggctgctttaacctcagcatccgagggcatggggaatgcgttgaatatgtcaagagcttcaatatccctctactcgtgctgggtggtggtggttatactgtccgaaatgttgcccgctgctggacatatgagacatcgctgctggtagaagaggccattagtgaggagcttccctatagtgaatacttcgagtactttgccccagacttcacacttcatccagatgtcagcacccgcatcgagaatcagaactcacgccagtatctggaccagatccgccagacaatctttgaaaacctgaagatgctgaaccatgcacctagtgtccagattcatgacgtgcctgcagacctcctgacctatgacaggactgatgaggctgatgcagaggagaggggtcctgaggagaactatagcaggccagaggcacccaatgagttctatgatggagaccatgacaatgacaaggaaagcgatgtggagattgagggcagcggctaatgagatcccaagcacgcagcaatgcagctcaaaacgcttagcctagccacacccccacgggaaacagcagtgattaacctttagcaataaacgaaagtttaactaagctatactaaccccagggttggtcaatttcgtgccagccacaccctggtactgcatgcacgcaatgctagctgcccctttcccgtcctgggcaccccgagtctcccccgaccccgggtcccaggtatgctcccacctccacctgccccactcaccacctctgctagttccagacacctccgagacgagg

SEQ ID NO: 317 - RNA, 7543 nt, synthetic construct
  misc_feature 1..7543: note = V65 mRNA
  source 1..7543: mol_type = other RNA
aggactcactatttgttttcgcgcccagttgcaaaaagtgtcgacatttgcttctgacacaactgtgttcactagcaacctcaaacagacaccgccaccatgcctgctgctaagagagtgaaactggatggatccaaccatgaccaggaatttgaccccccaaaggtttacccacctgtgccagctgagaagaggaagcccatccgcgtgctgtctctctttgatgggattgctacagggctcctggtgctgaaggacctgggcatccaagtggaccgctacattgcctccgaggtgtgtgaggactccatcacggtgggcatggtgcggcaccagggaaagatcatgtacgtcggggacgtccgcagcgtcacacagaagcatatccaggagtggggcccattcgacctggtgattggaggcagtccctgcaatgacctctccattgtcaaccctgcccgcaagggactttatgagggtactggccgcctcttctttgagttctaccgcctcctgcatgatgcgcggcccaaggagggagatgatcgccccttcttctggctctttgagaatgtggtggccatgggcgttagtgacaagagggacatctcgcgatttcttgagtctaaccccgtgatgattgacgccaaagaagtgtctgctgcacacagggcccgttacttctggggtaaccttcctggcatgaacaggcctttggcatccactgtgaatgataagctggagctgcaagagtgtctggagcacggcagaatagccaagttcagcaaagtgaggaccattaccaccaggtcaaactctataaagcagggcaaagaccagcatttccccgtcttcatgaacgagaaggaggacatcctgtggtgcactgaaatggaaagggtgtttggcttccccgtccactacacagacgtctccaacatgagccgcttggcgaggcagagactgctgggccgatcgtggagcgtgccggtcatccgccacctcttcgctccgctgaaggaatattttgcttgtgtgtctagcggcaatagtaacgctaacagccgcgggccgagcttcagcagcggcctggtgccgttaagcttgcgcggcagccatatgggccctatggagatatacaagacagtgtctgcatggaagagacagccagtgcgggtactgagcctcttcagaaacatcgacaaggtactaaagagtttgggcttcttggaaagcggttctggttctgggggaggaacgctgaagtacgtggaagatgtcacaaatgtcgtgaggagagacgtggagaaatggggcccctttgacctggtgtacggctcgacgcagcccctaggcagctcttgtgatcgctgtcccggctggtacatgttccagttccaccggatcctgcagtatgcgctgcctcgccaggagagtcagcggcccttcttctggatattcatggacaatctgctgctgactgaggatgaccaagagacaactacccgcttccttcagacagaggctgtgaccctccaggatgtccgtggcagagactaccagaatgctatgcgggtgtggagcaacattccagggctgaagagcaagcatgcgcccctgaccccaaaggaagaagagtatctgcaagcccaagtcagaagcaggagcaagctggacgccccgaaagttgacctcctggtgaagaactgccttctcccgctgagagagtacttcaagtatttttctcaaaactcacttcctcttggagggccgagctctggcgcacccccaccaagtggagggtctcctgccgggtccccaacatctactgaagaaggcaccagcgaatccgcaacgcccgagtcaggccctggtacctccacagaaccatctgaaggtagtgcgcctggttccccagctggaagccctacttccaccgaagaaggcacgtcaaccgaaccaagtgaaggatctgcccctgggaccagcactgaaccatctgagccaaaaaagaagagaaaggtaatggacaagaagtacagcatcggcctggccatcggcaccaactctgtgggctgggccgtgatcaccgacgagtacaaggtgcccagcaagaaattcaaggtgctgggcaacaccgaccggcacagcatcaagaagaacctgatcggcgccctgctgttcgacagcggagaaacagccgaggccacccggctgaagagaaccgccagaagaagatacaccagacggaagaaccggatctgctatctgcaagagatcttcagcaacgagatggccaaggtggacgacagcttcttccacagactggaagagtccttcctggtggaagaggataagaagcacgagcggcaccccatcttcggcaacatcgtggacgaggtggcctaccacgagaagtaccccaccatctaccacctgagaaagaaactggtggacagcaccgacaaggccgacctgcggctgatctatctggccctggcccacatgatcaagttccggggccacttcctgatcgagggcgacctgaaccccgacaacagcgacgtggacaagctgttcatccagctggtgcagacctacaaccagctgttcgaggaaaaccccatcaacgccagcggcgtggacgccaaggccatcctgtctgccagactgagcaagagcagacggctggaaaatctgatcgcccagctgcccggcgagaagaagaatggcctgttcggcaacctgattgccctgagcctgggcctgacccccaacttcaagagcaacttcgacctggccgaggatgccaaactgcagctgagcaaggacacctacgacgacgacctggacaacctgctggcccagatcggcgaccagtacgccgacctgtttctggccgccaagaacctgtccgacgccatcctgctgagcgacatcctgagagtgaacaccgagatcaccaaggcccccctgagcgcctctatgatcaagagatacgacgagcaccaccaggacctgaccctgctgaaagctctcgtgcggcagcagctgcctgagaagtacaaagagattttcttcgaccagagcaagaacggctacgccggctacatcgatggcggagccagccaggaagagttctacaagttcatcaagcccatcctggaaaagatggacggcaccgaggaactgctcgtgaagctgaacagagaggacctgctgcggaagcagcggaccttcgacaacggcagcatcccccaccagatccacctgggagagctgcacgccattctgcggcggcaggaagatttttacccattcctgaaggacaaccgggaaaagatcgagaagatcctgaccttccgcatcccctactacgtgggccctctggccaggggaaacagcagattcgcctggatgaccagaaagagcgaggaaaccatcaccccctggaacttcgaggaagtggtggacaagggcgccagcgcccagagcttcatcgagcggatgaccaacttcgataagaacctgcccaacgagaaggtgctgcccaagcacagcctgctgtacgagtacttcaccgtgtacaacgagctgaccaaagtgaaatacgtgaccgagggaatgagaaagcccgccttcctgagcggcgagcagaaaaaagccatcgtggacctgctgttcaagaccaaccggaaagtgaccgtgaagcagctgaaagaggactacttcaagaaaatcgagtgcttcgactccgtggaaatctccggcgtggaagatcggttcaacgcctccctgggcacataccacgatctgctgaaaattatcaaggacaaggacttcctggacaatgaggaaaacgaggacattctggaagatatcgtgctgaccctgacactgtttgaggacagagagatgatcgaggaacggctgaaaacctatgcccacctgttcgacgacaaagtgatgaagcagctgaagcggcggagatacaccggctggggcaggctgagccggaagctgatcaacggcatccgggacaagcagtccggcaagacaatcctggatttcctgaagtccgacggcttcgccaacagaaacttcatgcagctgatccacgacgacagcctgacctttaaagaggacatccagaaagcccaggtgtccggccagggcgatagcctgcacgagcacattgccaatctggccggcagccccgccattaagaagggcatcctgcagacagtgaaggtggtggacgagctcgtgaaagtgatgggccggcacaagcccgagaacatcgtgatcgaaatggccagagagaaccagaccacccagaagggacagaagaacagccgcgagagaatgaagcggatcgaagagggcatcaaagagctgggcagccagatcctgaaagaacaccccgtggaaaacacccagctgcagaacgagaagctgtacctgtactacctgcagaatgggcgggatatgtacgtggaccaggaactggacatcaaccggctgtccgactacgatgtggacgctatcgtgcctcagagctttctgaaggacgactccatcgataacaaagtgctgactcggagcgacaagaaccggggcaagagcgacaacgtgccctccgaagaggtcgtgaagaagatgaagaactactggcgccagctgctgaatgccaagctgattacccagaggaagttcgacaatctgaccaaggccgagagaggcggcctgagcgaactggataaggccggcttcatcaagagacagctggtggaaacccggcagatcacaaagcacgtggcacagatcctggactcccggatgaacactaagtacgacgagaacgacaaactgatccgggaagtgaaagtgatcaccctgaagtccaagctggtgtccgatttccggaaggatttccagttttacaaagtgcgcgagatcaacaactaccaccacgcccacgacgcctacctgaacgccgtcgtgggaaccgccctgatcaaaaagtaccctaagctggaaagcgagttcgtgtacggcgactacaaggtgtacgacgtgcggaagatgatcgccaagagcgagcaggaaatcggcaaggctaccgccaagtacttcttctacagcaacatcatgaactttttcaagaccgagattaccctggccaacggcgagatccggaagcggcctctgatcgagacaaacggcgaaacaggcgagatcgtgtgggataagggccgggactttgccaccgtgcggaaagtgctgtctatgccccaagtgaatatcgtgaaaaagaccgaggtgcagacaggcggcttcagcaaagagtctatcctgcccaagaggaacagcgacaagctgatcgccagaaagaaggactgggaccctaagaagtacggcggcttcgacagccccaccgtggcctattctgtgctggtggtggccaaagtggaaaagggcaagtccaagaaactgaagagtgtgaaagagctgctggggatcaccatcatggaaagaagcagcttcgagaagaatcccatcgactttctggaagccaagggctacaaagaagtgaaaaaggacctgatcatcaagctgcctaagtactccctgttcgagctggaaaacggccggaagagaatgctggcctctgccggcgaactgcagaagggaaacgaactggccctgccctccaaatatgtgaacttcctgtacctggccagccactatgagaagctgaagggctcccccgaggataatgagcagaaacagctgtttgtggaacagcacaaacactacctggacgagatcatcgagcagatcagcgagttctccaagagagtgatcctggccgacgctaatctggacaaggtgctgagcgcctacaacaagcacagagacaagcctatcagagagcaggccgagaatatcatccacctgtttaccctgaccaatctgggagcccctgccgccttcaagtactttgacaccaccatcgaccggaagaggtacaccagcaccaaagaggtgctggacgccaccctgatccaccagagcatcaccggcctgtacgagacacggatcgacctgtctcagctgggaggcgacgcctatccctatgacgtgcccgattatgccagcctgggcagcggctcccccaagaaaaaacgcaaggtggaagatcctaagaaaaagcggaaagtggacggcagcggcagcgagacccccggtaccagcgagagcgccacccccgagagccggacactcgccaagaccgtggcctatttctacgaccccgacgtgggcaacttccactacggagctggacaccctatgaagccccatcgcctggcattgacccatagcctggtcctgcattacggtctctataagaagatgatcgtcttcaagccataccaggcctcccaacatgacatgtgccgcttccactccgaggactacattgacttcctgcagagagtcagccccaccaatatgcaaggcttcaccaagagtcttaatgccttcaacgtaggcgatgactgcccagtgtttcccgggctctttgagttctgctcgcgttacacaggcgcatctctgcaaggagcaacccagctgaacaacaagatctgtgatattgccattaactgggctggtggtctgcaccatgccaagaagtttgaggcctctggcttctgctatgtcaacgacattgtgattggcatcctggagctgctcaagtaccaccctcgggtgctctacattgacattgacatccaccatggtgacggggttcaagaagctttctacctcactgaccgggtcatgacggtgtccttccacaaatacggaaattacttcttccctggcacaggtgacatgtatgaagtcggggcagagagtggccgctactactgtctgaacgtgcccctgcgggatggcattgatgaccagagttacaagcaccttttccagccggttatcaaccaggtagtggacttctaccaacccacgtgcattgtgctccagtgtggagctgactctctgggctgtgatcgattgggctgctttaacctcagcatccgagggcatggggaatgcgttgaatatgtcaagagcttcaatatccctctactcgtgctgggtggtggtggttatactgtccgaaatgttgcccgctgctggacatatgagacatcgctgctggtagaagagggcagcggctaatgagatcccaagcacgcagcaatgcagctcaaaacgcttagcctagccacacccccacgggaaacagcagtgattaacctttagcaataaacgaaagtttaactaagctatactaaccccagggttggtcaatttcgtgccagccacaccctggtactgcatgcacgcaatgctagctgcccctttcccgtcctgggcaccccgagtctcccccgaccccgggtcccaggtatgctcccacctccacctgccccactcaccacctctgctagttccagacacctccgagacgagg

SEQ ID NO: 318 - RNA, 7693 nt, synthetic construct
  misc_feature 1..7693: note = V66 mRNA
  source 1..7693: mol_type = other RNA
aggactcactatttgttttcgcgcccagttgcaaaaagtgtcgacatttgcttctgacacaactgtgttcactagcaacctcaaacagacaccgccaccatgcctgctgctaagagagtgaaactggatggatccaaccatgaccaggaatttgaccccccaaaggtttacccacctgtgccagctgagaagaggaagcccatccgcgtgctgtctctctttgatgggattgctacagggctcctggtgctgaaggacctgggcatccaagtggaccgctacattgcctccgaggtgtgtgaggactccatcacggtgggcatggtgcggcaccagggaaagatcatgtacgtcggggacgtccgcagcgtcacacagaagcatatccaggagtggggcccattcgacctggtgattggaggcagtccctgcaatgacctctccattgtcaaccctgcccgcaagggactttatgagggtactggccgcctcttctttgagttctaccgcctcctgcatgatgcgcggcccaaggagggagatgatcgccccttcttctggctctttgagaatgtggtggccatgggcgttagtgacaagagggacatctcgcgatttcttgagtctaaccccgtgatgattgacgccaaagaagtgtctgctgcacacagggcccgttacttctggggtaaccttcctggcatgaacaggcctttggcatccactgtgaatgataagctggagctgcaagagtgtctggagcacggcagaatagccaagttcagcaaagtgaggaccattaccaccaggtcaaactctataaagcagggcaaagaccagcatttccccgtcttcatgaacgagaaggaggacatcctgtggtgcactgaaatggaaagggtgtttggcttccccgtccactacacagacgtctccaacatgagccgcttggcgaggcagagactgctgggccgatcgtggagcgtgccggtcatccgccacctcttcgctccgctgaaggaatattttgcttgtgtgtctagcggcaatagtaacgctaacagccgcgggccgagcttcagcagcggcctggtgccgttaagcttgcgcggcagccatatgggccctatggagatatacaagacagtgtctgcatggaagagacagccagtgcgggtactgagcctcttcagaaacatcgacaaggtactaaagagtttgggcttcttggaaagcggttctggttctgggggaggaacgctgaagtacgtggaagatgtcacaaatgtcgtgaggagagacgtggagaaatggggcccctttgacctggtgtacggctcgacgcagcccctaggcagctcttgtgatcgctgtcccggctggtacatgttccagttccaccggatcctgcagtatgcgctgcctcgccaggagagtcagcggcccttcttctggatattcatggacaatctgctgctgactgaggatgaccaagagacaactacccgcttccttcagacagaggctgtgaccctccaggatgtccgtggcagagactaccagaatgctatgcgggtgtggagcaacattccagggctgaagagcaagcatgcgcccctgaccccaaaggaagaagagtatctgcaagcccaagtcagaagcaggagcaagctggacgccccgaaagttgacctcctggtgaagaactgccttctcccgctgagagagtacttcaagtatttttctcaaaactcacttcctcttggagggccgagctctggcgcacccccaccaagtggagggtctcctgccgggtccccaacatctactgaagaaggcaccagcgaatccgcaacgcccgagtcaggccctggtacctccacagaaccatctgaaggtagtgcgcctggttccccagctggaagccctacttccaccgaagaaggcacgtcaaccgaaccaagtgaaggatctgcccctgggaccagcactgaaccatctgagccaaaaaagaagagaaaggtaatggacaagaagtacagcatcggcctggccatcggcaccaactctgtgggctgggccgtgatcaccgacgagtacaaggtgcccagcaagaaattcaaggtgctgggcaacaccgaccggcacagcatcaagaagaacctgatcggcgccctgctgttcgacagcggagaaacagccgaggccacccggctgaagagaaccgccagaagaagatacaccagacggaagaaccggatctgctatctgcaagagatcttcagcaacgagatggccaaggtggacgacagcttcttccacagactggaagagtccttcctggtggaagaggataagaagcacgagcggcaccccatcttcggcaacatcgtggacgaggtggcctaccacgagaagtaccccaccatctaccacctgagaaagaaactggtggacagcaccgacaaggccgacctgcggctgatctatctggccctggcccacatgatcaagttccggggccacttcctgatcgagggcgacctgaaccccgacaacagcgacgtggacaagctgttcatccagctggtgcagacctacaaccagctgttcgaggaaaaccccatcaacgccagcggcgtggacgccaaggccatcctgtctgccagactgagcaagagcagacggctggaaaatctgatcgcccagctgcccggcgagaagaagaatggcctgttcggcaacctgattgccctgagcctgggcctgacccccaacttcaagagcaacttcgacctggccgaggatgccaaactgcagctgagcaaggacacctacgacgacgacctggacaacctgctggcccagatcggcgaccagtacgccgacctgtttctggccgccaagaacctgtccgacgccatcctgctgagcgacatcctgagagtgaacaccgagatcaccaaggcccccctgagcgcctctatgatcaagagatacgacgagcaccaccaggacctgaccctgctgaaagctctcgtgcggcagcagctgcctgagaagtacaaagagattttcttcgaccagagcaagaacggctacgccggctacatcgatggcggagccagccaggaagagttctacaagttcatcaagcccatcctggaaaagatggacggcaccgaggaactgctcgtgaagctgaacagagaggacctgctgcggaagcagcggaccttcgacaacggcagcatcccccaccagatccacctgggagagctgcacgccattctgcggcggcaggaagatttttacccattcctgaaggacaaccgggaaaagatcgagaagatcctgaccttccgcatcccctactacgtgggccctctggccaggggaaacagcagattcgcctggatgaccagaaagagcgaggaaaccatcaccccctggaacttcgaggaagtggtggacaagggcgccagcgcccagagcttcatcgagcggatgaccaacttcgataagaacctgcccaacgagaaggtgctgcccaagcacagcctgctgtacgagtacttcaccgtgtacaacgagctgaccaaagtgaaatacgtgaccgagggaatgagaaagcccgccttcctgagcggcgagcagaaaaaagccatcgtggacctgctgttcaagaccaaccggaaagtgaccgtgaagcagctgaaagaggactacttcaagaaaatcgagtgcttcgactccgtggaaatctccggcgtggaagatcggttcaacgcctccctgggcacataccacgatctgctgaaaattatcaaggacaaggacttcctggacaatgaggaaaacgaggacattctggaagatatcgtgctgaccctgacactgtttgaggacagagagatgatcgaggaacggctgaaaacctatgcccacctgttcgacgacaaagtgatgaagcagctgaagcggcggagatacaccggctggggcaggctgagccggaagctgatcaacggcatccgggacaagcagtccggcaagacaatcctggatttcctgaagtccgacggcttcgccaacagaaacttcatgcagctgatccacgacgacagcctgacctttaaagaggacatccagaaagcccaggtgtccggccagggcgatagcctgcacgagcacattgccaatctggccggcagccccgccattaagaagggcatcctgcagacagtgaaggtggtggacgagctcgtgaaagtgatgggccggcacaagcccgagaacatcgtgatcgaaatggccagagagaaccagaccacccagaagggacagaagaacagccgcgagagaatgaagcggatcgaagagggcatcaaagagctgggcagccagatcctgaaagaacaccccgtggaaaacacccagctgcagaacgagaagctgtacctgtactacctgcagaatgggcgggatatgtacgtggaccaggaactggacatcaaccggctgtccgactacgatgtggacgctatcgtgcctcagagctttctgaaggacgactccatcgataacaaagtgctgactcggagcgacaagaaccggggcaagagcgacaacgtgccctccgaagaggtcgtgaagaagatgaagaactactggcgccagctgctgaatgccaagctgattacccagaggaagttcgacaatctgaccaaggccgagagaggcggcctgagcgaactggataaggccggcttcatcaagagacagctggtggaaacccggcagatcacaaagcacgtggcacagatcctggactcccggatgaacactaagtacgacgagaacgacaaactgatccgggaagtgaaagtgatcaccctgaagtccaagctggtgtccgatttccggaaggatttccagttttacaaagtgcgcgagatcaacaactaccaccacgcccacgacgcctacctgaacgccgtcgtgggaaccgccctgatcaaaaagtaccctaagctggaaagcgagttcgtgtacggcgactacaaggtgtacgacgtgcggaagatgatcgccaagagcgagcaggaaatcggcaaggctaccgccaagtacttcttctacagcaacatcatgaactttttcaagaccgagattaccctggccaacggcgagatccggaagcggcctctgatcgagacaaacggcgaaacaggcgagatcgtgtgggataagggccgggactttgccaccgtgcggaaagtgctgtctatgccccaagtgaatatcgtgaaaaagaccgaggtgcagacaggcggcttcagcaaagagtctatcctgcccaagaggaacagcgacaagctgatcgccagaaagaaggactgggaccctaagaagtacggcggcttcgacagccccaccgtggcctattctgtgctggtggtggccaaagtggaaaagggcaagtccaagaaactgaagagtgtgaaagagctgctggggatcaccatcatggaaagaagcagcttcgagaagaatcccatcgactttctggaagccaagggctacaaagaagtgaaaaaggacctgatcatcaagctgcctaagtactccctgttcgagctggaaaacggccggaagagaatgctggcctctgccggcgaactgcagaagggaaacgaactggccctgccctccaaatatgtgaacttcctgtacctggccagccactatgagaagctgaagggctcccccgaggataatgagcagaaacagctgtttgtggaacagcacaaacactacctggacgagatcatcgagcagatcagcgagttctccaagagagtgatcctggccgacgctaatctggacaaggtgctgagcgcctacaacaagcacagagacaagcctatcagagagcaggccgagaatatcatccacctgtttaccctgaccaatctgggagcccctgccgccttcaagtactttgacaccaccatcgaccggaagaggtacaccagcaccaaagaggtgctggacgccaccctgatccaccagagcatcaccggcctgtacgagacacggatcgacctgtctcagctgggaggcgacgcctatccctatgacgtgcccgattatgccagcctgggcagcggctcccccaagaaaaaacgcaaggtggaagatcctaagaaaaagcggaaagtggacggcagcggcagcgagacccccggtaccagcgagagcgccacccccgagagccggacactcgccaagaccgtggcctatttctacgaccccgacgtgggcaacttccactacggagctggacaccctatgaagccccatcgcctggcattgacccatagcctggtcctgcattacggtctctataagaagatgatcgtcttcaagccataccaggcctcccaacatgacatgtgccgcttccactccgaggactacattgacttcctgcagagagtcagccccaccaatatgcaaggcttcaccaagagtcttaatgccttcaacgtaggcgatgactgcccagtgtttcccgggctctttgagttctgctcgcgttacacaggcgcatctctgcaaggagcaacccagctgaacaacaagatctgtgatattgccattaactgggctggtggtctgcaccatgccaagaagtttgaggcctctggcttctgctatgtcaacgacattgtgattggcatcctggagctgctcaagtaccaccctcgggtgctctacattgacattgacatccaccatggtgacggggttcaagaagctttctacctcactgaccgggtcatgacggtgtccttccacaaatacggaaattacttcttccctggcacaggtgacatgtatgaagtcggggcagagagtggccgctactactgtctgaacgtgcccctgcgggatggcattgatgaccagagttacaagcaccttttccagccggttatcaaccaggtagtggacttctaccaacccacgtgcattgtgctccagtgtggagctgactctctgggctgtgatcgattgggctgctttaacctcagcatccgagggcatggggaatgcgttgaatatgtcaagagcttcaatatccctctactcgtgctgggtggtggtggttatactgtccgaaatgttgcccgctgctggacatatgagacatcgctgctggtagaagaggccattagtgaggagcttccctatagtgaatacttcgagtactttgccccagacttcacacttcatccagatgtcagcacccgcatcgagaatcagaactcacgccagtatctggaccagatccgccagacaatctttgaaaacctggagggcagcggctaatgagatcccaagcacgcagcaatgcagctcaaaacgcttagcctagccacacccccacgggaaacagcagtgattaacctttagcaataaacgaaagtttaactaagctatactaaccccagggttggtcaatttcgtgccagccacaccctggtactgcatgcacgcaatgctagctgcccctttcccgtcctgggcaccccgagtctcccccgaccccgggtcccaggtatgctcccacctccacctgccccactcaccacctctgctagttccagacacctccgagacgagg

SEQ ID NO: 319 - RNA, 7489 nt, synthetic construct
  misc_feature 1..7489: note = V67 mRNA
  source 1..7489: mol_type = other RNA
aggactcactatttgttttcgcgcccagttgcaaaaagtgtcgacatttgcttctgacacaactgtgttcactagcaacctcaaacagacaccgccaccatgcctgctgctaagagagtgaaactggatggatccaaccatgaccaggaatttgaccccccaaaggtttacccacctgtgccagctgagaagaggaagcccatccgcgtgctgtctctctttgatgggattgctacagggctcctggtgctgaaggacctgggcatccaagtggaccgctacattgcctccgaggtgtgtgaggactccatcacggtgggcatggtgcggcaccagggaaagatcatgtacgtcggggacgtccgcagcgtcacacagaagcatatccaggagtggggcccattcgacctggtgattggaggcagtccctgcaatgacctctccattgtcaaccctgcccgcaagggactttatgagggtactggccgcctcttctttgagttctaccgcctcctgcatgatgcgcggcccaaggagggagatgatcgccccttcttctggctctttgagaatgtggtggccatgggcgttagtgacaagagggacatctcgcgatttcttgagtctaaccccgtgatgattgacgccaaagaagtgtctgctgcacacagggcccgttacttctggggtaaccttcctggcatgaacaggcctttggcatccactgtgaatgataagctggagctgcaagagtgtctggagcacggcagaatagccaagttcagcaaagtgaggaccattaccaccaggtcaaactctataaagcagggcaaagaccagcatttccccgtcttcatgaacgagaaggaggacatcctgtggtgcactgaaatggaaagggtgtttggcttccccgtccactacacagacgtctccaacatgagccgcttggcgaggcagagactgctgggccgatcgtggagcgtgccggtcatccgccacctcttcgctccgctgaaggaatattttgcttgtgtgtctagcggcaatagtaacgctaacagccgcgggccgagcttcagcagcggcctggtgccgttaagcttgcgcggcagccatatgggccctatggagatatacaagacagtgtctgcatggaagagacagccagtgcgggtactgagcctcttcagaaacatcgacaaggtactaaagagtttgggcttcttggaaagcggttctggttctgggggaggaacgctgaagtacgtggaagatgtcacaaatgtcgtgaggagagacgtggagaaatggggcccctttgacctggtgtacggctcgacgcagcccctaggcagctcttgtgatcgctgtcccggctggtacatgttccagttccaccggatcctgcagtatgcgctgcctcgccaggagagtcagcggcccttcttctggatattcatggacaatctgctgctgactgaggatgaccaagagacaactacccgcttccttcagacagaggctgtgaccctccaggatgtccgtggcagagactaccagaatgctatgcgggtgtggagcaacattccagggctgaagagcaagcatgcgcccctgaccccaaaggaagaagagtatctgcaagcccaagtcagaagcaggagcaagctggacgccccgaaagttgacctcctggtgaagaactgccttctcccgctgagagagtacttcaagtatttttctcaaaactcacttcctcttggagggccgagctctggcgcacccccaccaagtggagggtctcctgccgggtccccaacatctactgaagaaggcaccagcgaatccgcaacgcccgagtcaggccctggtacctccacagaaccatctgaaggtagtgcgcctggttccccagctggaagccctacttccaccgaagaaggcacgtcaaccgaaccaagtgaaggatctgcccctgggaccagcactgaaccatctgagccaaaaaagaagagaaaggtaatggacaagaagtacagcatcggcctggccatcggcaccaactctgtgggctgggccgtgatcaccgacgagtacaaggtgcccagcaagaaattcaaggtgctgggcaacaccgaccggcacagcatcaagaagaacctgatcggcgccctgctgttcgacagcggagaaacagccgaggccacccggctgaagagaaccgccagaagaagatacaccagacggaagaaccggatctgctatctgcaagagatcttcagcaacgagatggccaaggtggacgacagcttcttccacagactggaagagtccttcctggtggaagaggataagaagcacgagcggcaccccatcttcggcaacatcgtggacgaggtggcctaccacgagaagtaccccaccatctaccacctgagaaagaaactggtggacagcaccgacaaggccgacctgcggctgatctatctggccctggcccacatgatcaagttccggggccacttcctgatcgagggcgacctgaaccccgacaacagcgacgtggacaagctgttcatccagctggtgcagacctacaaccagctgttcgaggaaaaccccatcaacgccagcggcgtggacgccaaggccatcctgtctgccagactgagcaagagcagacggctggaaaatctgatcgcccagctgcccggcgagaagaagaatggcctgttcggcaacctgattgccctgagcctgggcctgacccccaacttcaagagcaacttcgacctggccgaggatgccaaactgcagctgagcaaggacacctacgacgacgacctggacaacctgctggcccagatcggcgaccagtacgccgacctgtttctggccgccaagaacctgtccgacgccatcctgctgagcgacatcctgagagtgaacaccgagatcaccaaggcccccctgagcgcctctatgatcaagagatacgacgagcaccaccaggacctgaccctgctgaaagctctcgtgcggcagcagctgcctgagaagtacaaagagattttcttcgaccagagcaagaacggctacgccggctacatcgatggcggagccagccaggaagagttctacaagttcatcaagcccatcctggaaaagatggacggcaccgaggaactgctcgtgaagctgaacagagaggacctgctgcggaagcagcggaccttcgacaacggcagcatcccccaccagatccacctgggagagctgcacgccattctgcggcggcaggaagatttttacccattcctgaaggacaaccgggaaaagatcgagaagatcctgaccttccgcatcccctactacgtgggccctctggccaggggaaacagcagattcgcctggatgaccagaaagagcgaggaaaccatcaccccctggaacttcgaggaagtggtggacaagggcgccagcgcccagagcttcatcgagcggatgaccaacttcgataagaacctgcccaacgagaaggtgctgcccaagcacagcctgctgtacgagtacttcaccgtgtacaacgagctgaccaaagtgaaatacgtgaccgagggaatgagaaagcccgccttcctgagcggcgagcagaaaaaagccatcgtggacctgctgttcaagaccaaccggaaagtgaccgtgaagcagctgaaagaggactacttcaagaaaatcgagtgcttcgactccgtggaaatctccggcgtggaagatcggttcaacgcctccctgggcacataccacgatctgctgaaaattatcaaggacaaggacttcctggacaatgaggaaaacgaggacattctggaagatatcgtgctgaccctgacactgtttgaggacagagagatgatcgaggaacggctgaaaacctatgcccacctgttcgacgacaaagtgatgaagcagctgaagcggcggagatacaccggctggggcaggctgagccggaagctgatcaacggcatccgggacaagcagtccggcaagacaatcctggatttcctgaagtccgacggcttcgccaacagaaacttcatgcagctgatccacgacgacagcctgacctttaaagaggacatccagaaagcccaggtgtccggccagggcgatagcctgcacgagcacattgccaatctggccggcagccccgccattaagaagggcatcctgcagacagtgaaggtggtggacgagctcgtgaaagtgatgggccggcacaagcccgagaacatcgtgatcgaaatggccagagagaaccagaccacccagaagggacagaagaacagccgcgagagaatgaagcggatcgaagagggcatcaaagagctgggcagccagatcctgaaagaacaccccgtggaaaacacccagctgcagaacgagaagctgtacctgtactacctgcagaatgggcgggatatgtacgtggaccaggaactggacatcaaccggctgtccgactacgatgtggacgctatcgtgcctcagagctttctgaaggacgactccatcgataacaaagtgctgactcggagcgacaagaaccggggcaagagcgacaacgtgccctccgaagaggtcgtgaagaagatgaagaactactggcgccagctgctgaatgccaagctgattacccagaggaagttcgacaatctgaccaaggccgagagaggcggcctgagcgaactggataaggccggcttcatcaagagacagctggtggaaacccggcagatcacaaagcacgtggcacagatcctggactcccggatgaacactaagtacgacgagaacgacaaactgatccgggaagtgaaagtgatcaccctgaagtccaagctggtgtccgatttccggaaggatttccagttttacaaagtgcgcgagatcaacaactaccaccacgcccacgacgcctacctgaacgccgtcgtgggaaccgccctgatcaaaaagtaccctaagctggaaagcgagttcgtgtacggcgactacaaggtgtacgacgtgcggaagatgatcgccaagagcgagcaggaaatcggcaaggctaccgccaagtacttcttctacagcaacatcatgaactttttcaagaccgagattaccctggccaacggcgagatccggaagcggcctctgatcgagacaaacggcgaaacaggcgagatcgtgtgggataagggccgggactttgccaccgtgcggaaagtgctgtctatgccccaagtgaatatcgtgaaaaagaccgaggtgcagacaggcggcttcagcaaagagtctatcctgcccaagaggaacagcgacaagctgatcgccagaaagaaggactgggaccctaagaagtacggcggcttcgacagccccaccgtggcctattctgtgctggtggtggccaaagtggaaaagggcaagtccaagaaactgaagagtgtgaaagagctgctggggatcaccatcatggaaagaagcagcttcgagaagaatcccatcgactttctggaagccaagggctacaaagaagtgaaaaaggacctgatcatcaagctgcctaagtactccctgttcgagctggaaaacggccggaagagaatgctggcctctgccggcgaactgcagaagggaaacgaactggccctgccctccaaatatgtgaacttcctgtacctggccagccactatgagaagctgaagggctcccccgaggataatgagcagaaacagctgtttgtggaacagcacaaacactacctggacgagatcatcgagcagatcagcgagttctccaagagagtgatcctggccgacgctaatctggacaaggtgctgagcgcctacaacaagcacagagacaagcctatcagagagcaggccgagaatatcatccacctgtttaccctgaccaatctgggagcccctgccgccttcaagtactttgacaccaccatcgaccggaagaggtacaccagcaccaaagaggtgctggacgccaccctgatccaccagagcatcaccggcctgtacgagacacggatcgacctgtctcagctgggaggcgacgcctatccctatgacgtgcccgattatgccagcctgggcagcggctcccccaagaaaaaacgcaaggtggaagatcctaagaaaaagcggaaagtggacggcagcggcagcgagacccccggtaccagcgagagcgccacccccgagagccggacaaatcgggccatccgcacagagaagatcatctgccgggacgtggctcggggctatgagaacgtgcccattccctgtgtcaacggtgtggatggggagccctgccctgaggattacaagtacatctcagagaactgcgagacgtccaccatgaacatcgatcgcaacatcacccacctgcagcactgcacgtgtgtggacgactgctctagctccaactgcctgtgcggccagctcagcatccggtgctggtatgacaaggatgggcgattgctccaggaatttaacaagattgagcctccgctgattttcgagtgtaaccaggcgtgctcatgctggagaaactgcaagaaccgggtcgtacagagtggcatcaaggtgcggctacagctctaccgaacagccaagatgggctggggggtccgcgccctgcagaccatcccacaggggaccttcatctgcgagtatgtcggggagctgatctctgatgctgaggctgatgtgagagaggatgattcttacctcttcgacttagacaacaaggatggagaggtgtactgcatagatgcccgttactatggcaacatcagccgcttcatcaaccacctgtgtgaccccaacatcattcccgtccgggtcttcatgctgcaccaagacctgcgatttccacgcatcgccttcttcagttcccgagacatccggactggggaggagctagggtttgactatggcgaccgcttctgggacatcaaaagcaaatatttcacctgccaatgtggctctgagaagtgcaagcactcagccgaagccattgccctggagcagagccgtctggcccgcctggacccacaccctgagctgctgcccgagctcggctccctgccccctgtcaacacagagggcagcggctaatgagatcccaagcacgcagcaatgcagctcaaaacgcttagcctagccacacccccacgggaaacagcagtgattaacctttagcaataaacgaaagtttaactaagctatactaaccccagggttggtcaatttcgtgccagccacaccctggtactgcatgcacgcaatgctagctgcccctttcccgtcctgggcaccccgagtctcccccgaccccgggtcccaggtatgctcccacctccacctgccccactcaccacctctgctagttccagacacctccgagacgagg

SEQ ID NO: 320 - RNA, 8050 nt, synthetic construct
  misc_feature 1..8050: note = V68 mRNA
  source 1..8050: mol_type = other RNA
aggactcactatttgttttcgcgcccagttgcaaaaagtgtcgacatttgcttctgacacaactgtgttcactagcaacctcaaacagacaccgccaccatgcctgctgctaagagagtgaaactggatggatccaccggtccagccaccatgaaccatgaccaggaatttgaccccccaaaggtttacccacctgtgccagctgagaagaggaagcccatccgcgtgctgtctctctttgatgggattgctacagggctcctggtgctgaaggacctgggcatccaagtggaccgctacattgcctccgaggtgtgtgaggactccatcacggtgggcatggtgcggcaccagggaaagatcatgtacgtcggggacgtccgcagcgtcacacagaagcatatccaggagtggggcccattcgacctggtgattggaggcagtccctgcaatgacctctccattgtcaaccctgcccgcaagggactttatgagggtactggccgcctcttctttgagttctaccgcctcctgcatgatgcgcggcccaaggagggagatgatcgccccttcttctggctctttgagaatgtggtggccatgggcgttagtgacaagagggacatctcgcgatttcttgagtctaaccccgtgatgattgacgccaaagaagtgtctgctgcacacagggcccgttacttctggggtaaccttcctggcatgaacaggcctttggcatccactgtgaatgataagctggagctgcaagagtgtctggagcacggcagaatagccaagttcagcaaagtgaggaccattaccaccaggtcaaactctataaagcagggcaaagaccagcatttccccgtcttcatgaacgagaaggaggacatcctgtggtgcactgaaatggaaagggtgtttggcttccccgtccactacacagacgtctccaacatgagccgcttggcgaggcagagactgctgggccgatcgtggagcgtgccggtcatccgccacctcttcgctccgctgaaggaatattttgcttgtgtgtctagcggcaatagtaacgctaacagccgcgggccgagcttcagcagcggcctggtgccgttaagcttgcgcggcagccatatgggccctatggagatatacaagacagtgtctgcatggaagagacagccagtgcgggtactgagcctcttcagaaacatcgacaaggtactaaagagtttgggcttcttggaaagcggttctggttctgggggaggaacgctgaagtacgtggaagatgtcacaaatgtcgtgaggagagacgtggagaaatggggcccctttgacctggtgtacggctcgacgcagcccctaggcagctcttgtgatcgctgtcccggctggtacatgttccagttccaccggatcctgcagtatgcgctgcctcgccaggagagtcagcggcccttcttctggatattcatggacaatctgctgctgactgaggatgaccaagagacaactacccgcttccttcagacagaggctgtgaccctccaggatgtccgtggcagagactaccagaatgctatgcgggtgtggagcaacattccagggctgaagagcaagcatgcgcccctgaccccaaaggaagaagagtatctgcaagcccaagtcagaagcaggagcaagctggacgccccgaaagttgacctcctggtgaagaactgccttctcccgctgagagagtacttcaagtatttttctcaaaactcacttcctcttggagggccgagctctggcgcacccccaccaagtggagggtctcctgccgggtccccaacatctactgaagaaggcaccagcgaatccgcaacgcccgagtcaggccctggtacctccacagaaccatctgaaggtagtgcgcctggttccccagctggaagccctacttccaccgaagaaggcacgtcaaccgaaccaagtgaaggatctgcccctgggaccagcactgaaccatctgagccaaaaaagaagagaaaggtaatggacaagaagtacagcatcggcctggccatcggcaccaactctgtgggctgggccgtgatcaccgacgagtacaaggtgcccagcaagaaattcaaggtgctgggcaacaccgaccggcacagcatcaagaagaacctgatcggcgccctgctgttcgacagcggagaaacagccgaggccacccggctgaagagaaccgccagaagaagatacaccagacggaagaaccggatctgctatctgcaagagatcttcagcaacgagatggccaaggtggacgacagcttcttccacagactggaagagtccttcctggtggaagaggataagaagcacgagcggcaccccatcttcggcaacatcgtggacgaggtggcctaccacgagaagtaccccaccatctaccacctgagaaagaaactggtggacagcaccgacaaggccgacctgcggctgatctatctggccctggcccacatgatcaagttccggggccacttcctgatcgagggcgacctgaaccccgacaacagcgacgtggacaagctgttcatccagctggtgcagacctacaaccagctgttcgaggaaaaccccatcaacgccagcggcgtggacgccaaggccatcctgtctgccagactgagcaagagcagacggctggaaaatctgatcgcccagctgcccggcgagaagaagaatggcctgttcggcaacctgattgccctgagcctgggcctgacccccaacttcaagagcaacttcgacctggccgaggatgccaaactgcagctgagcaaggacacctacgacgacgacctggacaacctgctggcccagatcggcgaccagtacgccgacctgtttctggccgccaagaacctgtccgacgccatcctgctgagcgacatcctgagagtgaacaccgagatcaccaaggcccccctgagcgcctctatgatcaagagatacgacgagcaccaccaggacctgaccctgctgaaagctctcgtgcggcagcagctgcctgagaagtacaaagagattttcttcgaccagagcaagaacggctacgccggctacatcgatggcggagccagccaggaagagttctacaagttcatcaagcccatcctggaaaagatggacggcaccgaggaactgctcgtgaagctgaacagagaggacctgctgcggaagcagcggaccttcgacaacggcagcatcccccaccagatccacctgggagagctgcacgccattctgcggcggcaggaagatttttacccattcctgaaggacaaccgggaaaagatcgagaagatcctgaccttccgcatcccctactacgtgggccctctggccaggggaaacagcagattcgcctggatgaccagaaagagcgaggaaaccatcaccccctggaacttcgaggaagtggtggacaagggcgccagcgcccagagcttcatcgagcggatgaccaacttcgataagaacctgcccaacgagaaggtgctgcccaagcacagcctgctgtacgagtacttcaccgtgtacaacgagctgaccaaagtgaaatacgtgaccgagggaatgagaaagcccgccttcctgagcggcgagcagaaaaaagccatcgtggacctgctgttcaagaccaaccggaaagtgaccgtgaagcagctgaaagaggactacttcaagaaaatcgagtgcttcgactccgtggaaatctccggcgtggaagatcggttcaacgcctccctgggcacataccacgatctgctgaaaattatcaaggacaaggacttcctggacaatgaggaaaacgaggacattctggaagatatcgtgctgaccctgacactgtttgaggacagagagatgatcgaggaacggctgaaaacctatgcccacctgttcgacgacaaagtgatgaagcagctgaagcggcggagatacaccggctggggcaggctgagccggaagctgatcaacggcatccgggacaagcagtccggcaagacaatcctggatttcctgaagtccgacggcttcgccaacagaaacttcatgcagctgatccacgacgacagcctgacctttaaagaggacatccagaaagcccaggtgtccggccagggcgatagcctgcacgagcacattgccaatctggccggcagccccgccattaagaagggcatcctgcagacagtgaaggtggtggacgagctcgtgaaagtgatgggccggcacaagcccgagaacatcgtgatcgaaatggccagagagaaccagaccacccagaagggacagaagaacagccgcgagagaatgaagcggatcgaagagggcatcaaagagctgggcagccagatcctgaaagaacaccccgtggaaaacacccagctgcagaacgagaagctgtacctgtactacctgcagaatgggcgggatatgtacgtggaccaggaactggacatcaaccggctgtccgactacgatgtggacgctatcgtgcctcagagctttctgaaggacgactccatcgataacaaagtgctgactcggagcgacaagaaccggggcaagagcgacaacgtgccctccgaagaggtcgtgaagaagatgaagaactactggcgccagctgctgaatgccaagctgattacccagaggaagttcgacaatctgaccaaggccgagagaggcggcctgagcgaactggataaggccggcttcatcaagagacagctggtggaaacccggcagatcacaaagcacgtggcacagatcctggactcccggatgaacactaagtacgacgagaacgacaaactgatccgggaagtgaaagtgatcaccctgaagtccaagctggtgtccgatttccggaaggatttccagttttacaaagtgcgcgagatcaacaactaccaccacgcccacgacgcctacctgaacgccgtcgtgggaaccgccctgatcaaaaagtaccctaagctggaaagcgagttcgtgtacggcgactacaaggtgtacgacgtgcggaagatgatcgccaagagcgagcaggaaatcggcaaggctaccgccaagtacttcttctacagcaacatcatgaactttttcaagaccgagattaccctggccaacggcgagatccggaagcggcctctgatcgagacaaacggcgaaacaggcgagatcgtgtgggataagggccgggactttgccaccgtgcggaaagtgctgtctatgccccaagtgaatatcgtgaaaaagaccgaggtgcagacaggcggcttcagcaaagagtctatcctgcccaagaggaacagcgacaagctgatcgccagaaagaaggactgggaccctaagaagtacggcggcttcgacagccccaccgtggcctattctgtgctggtggtggccaaagtggaaaagggcaagtccaagaaactgaagagtgtgaaagagctgctggggatcaccatcatggaaagaagcagcttcgagaagaatcccatcgactttctggaagccaagggctacaaagaagtgaaaaaggacctgatcatcaagctgcctaagtactccctgttcgagctggaaaacggccggaagagaatgctggcctctgccggcgaactgcagaagggaaacgaactggccctgccctccaaatatgtgaacttcctgtacctggccagccactatgagaagctgaagggctcccccgaggataatgagcagaaacagctgtttgtggaacagcacaaacactacctggacgagatcatcgagcagatcagcgagttctccaagagagtgatcctggccgacgctaatctggacaaggtgctgagcgcctacaacaagcacagagacaagcctatcagagagcaggccgagaatatcatccacctgtttaccctgaccaatctgggagcccctgccgccttcaagtactttgacaccaccatcgaccggaagaggtacaccagcaccaaagaggtgctggacgccaccctgatccaccagagcatcaccggcctgtacgagacacggatcgacctgtctcagctgggaggcgacgcctatccctatgacgtgcccgattatgccagcctgggcagcggctcccccaagaaaaaacgcaaggtggaagatcctaagaaaaagcggaaagtggacggcagcggcagcgagacccccggtaccagcgagagcgccacccccgagagccggacactcgagatggcgcagacgcagggcacccggaggaaagtctgttactactacgacggggatgttggaaattactattatggacaaggccacccaatgaagcctcaccgaatccgcatgactcataatttgctgctcaactatggtctctaccgaaaaatggaaatctatcgccctcacaaagccaatgctgaggagatgaccaagtaccacagcgatgactacattaaattcttgcgctccatccgtccagataacatgtcggagtacagcaagcagatgcagagattcaacgttggtgaggactgtccagtattcgatggcctgtttgagttctgtcagttgtctactggtggttctgtggcaagtgctgtgaaacttaataagcagcagacggacatcgctgtgaattgggctgggggcctgcaccatgcaaagaagtccgaggcatctggcttctgttacgtcaatgatatcgtcttggccatcctggaactgctaaagtatcaccagagggtgctgtacattgacattgatattcaccatggtgacggcgtggaagaggccttctacaccacggaccgggtcatgactgtgtcctttcataagtatggagagtacttcccaggaactggggacctacgggatatcggggctggcaaaggcaagtattatgctgttaactacccgctccgagacgggattgatgacgagtcctatgaggccattttcaagccggtcatgtccaaagtaatggagatgttccagcctagtgcggtggtcttacagtgtggctcagactccctatctggggatcggttaggttgcttcaatctaactatcaaaggacacgccaagtgtgtggaatttgtcaagagctttaacctgcctatgctgatgctgggaggcggtggttacaccattcgtaacgttgcccggtgctggacatatgagacagctgtggccctggatacggagatccctaatgagcttccatacaatgactactttgaatactttggaccagatttcaagctccacatcagtccttccaatatgactaaccagaacacgaatgagtacctggagaagatcaaacagcgactgtttgagaaccttagaatgctgccgcacgcacctggggtccaaatgcaggcgattcctgaggacgccatccctgaggagagtggcgatgaggacgaagacgaccctgacaagcgcatctcgatctgctcctctgacaaacgaattgcctgtgaggaagagttctccgattctgaagaggagggagaggggggccgcaagaactcttccaacttcaaaaaagccaagagagtcaaaacagaggatgaaaaagagaaagacccagaggagaagaaagaagtcaccgaagaggagaaaaccaaggaggagaagccagaagccaaaggggtcaaggaggaggtcaagttggcctgagatcccaagcacgcagcaatgcagctcaaaacgcttagcctagccacacccccacgggaaacagcagtgattaacctttagcaataaacgaaagtttaactaagctatactaaccccagggttggtcaatttcgtgccagccacaccctggtactgcatgcacgcaatgctagctgcccctttcccgtcctgggcaccccgagtctcccccgaccccgggtcccaggtatgctcccacctccacctgccccactcaccacctctgctagttccagacacctccgagacgagg

SEQ ID NO: 321 - RNA, 7717 nt, synthetic construct
  misc_feature 1..7717: note = V69 mRNA
  source 1..7717: mol_type = other RNA
aggactcactatttgttttcgcgcccagttgcaaaaagtgtcgacatttgcttctgacacaactgtgttcactagcaacctcaaacagacaccgccaccatgcctgctgctaagagagtgaaactggatggatccaccggtccagccaccatgaaccatgaccaggaatttgaccccccaaaggtttacccacctgtgccagctgagaagaggaagcccatccgcgtgctgtctctctttgatgggattgctacagggctcctggtgctgaaggacctgggcatccaagtggaccgctacattgcctccgaggtgtgtgaggactccatcacggtgggcatggtgcggcaccagggaaagatcatgtacgtcggggacgtccgcagcgtcacacagaagcatatccaggagtggggcccattcgacctggtgattggaggcagtccctgcaatgacctctccattgtcaaccctgcccgcaagggactttatgagggtactggccgcctcttctttgagttctaccgcctcctgcatgatgcgcggcccaaggagggagatgatcgccccttcttctggctctttgagaatgtggtggccatgggcgttagtgacaagagggacatctcgcgatttcttgagtctaaccccgtgatgattgacgccaaagaagtgtctgctgcacacagggcccgttacttctggggtaaccttcctggcatgaacaggcctttggcatccactgtgaatgataagctggagctgcaagagtgtctggagcacggcagaatagccaagttcagcaaagtgaggaccattaccaccaggtcaaactctataaagcagggcaaagaccagcatttccccgtcttcatgaacgagaaggaggacatcctgtggtgcactgaaatggaaagggtgtttggcttccccgtccactacacagacgtctccaacatgagccgcttggcgaggcagagactgctgggccgatcgtggagcgtgccggtcatccgccacctcttcgctccgctgaaggaatattttgcttgtgtgtctagcggcaatagtaacgctaacagccgcgggccgagcttcagcagcggcctggtgccgttaagcttgcgcggcagccatatgggccctatggagatatacaagacagtgtctgcatggaagagacagccagtgcgggtactgagcctcttcagaaacatcgacaaggtactaaagagtttgggcttcttggaaagcggttctggttctgggggaggaacgctgaagtacgtggaagatgtcacaaatgtcgtgaggagagacgtggagaaatggggcccctttgacctggtgtacggctcgacgcagcccctaggcagctcttgtgatcgctgtcccggctggtacatgttccagttccaccggatcctgcagtatgcgctgcctcgccaggagagtcagcggcccttcttctggatattcatggacaatctgctgctgactgaggatgaccaagagacaactacccgcttccttcagacagaggctgtgaccctccaggatgtccgtggcagagactaccagaatgctatgcgggtgtggagcaacattccagggctgaagagcaagcatgcgcccctgaccccaaaggaagaagagtatctgcaagcccaagtcagaagcaggagcaagctggacgccccgaaagttgacctcctggtgaagaactgccttctcccgctgagagagtacttcaagtatttttctcaaaactcacttcctcttggagggccgagctctggcgcacccccaccaagtggagggtctcctgccgggtccccaacatctactgaagaaggcaccagcgaatccgcaacgcccgagtcaggccctggtacctccacagaaccatctgaaggtagtgcgcctggttccccagctggaagccctacttccaccgaagaaggcacgtcaaccgaaccaagtgaaggatctgcccctgggaccagcactgaaccatctgagccaaaaaagaagagaaaggtaatggacaagaagtacagcatcggcctggccatcggcaccaactctgtgggctgggccgtgatcaccgacgagtacaaggtgcccagcaagaaattcaaggtgctgggcaacaccgaccggcacagcatcaagaagaacctgatcggcgccctgctgttcgacagcggagaaacagccgaggccacccggctgaagagaaccgccagaagaagatacaccagacggaagaaccggatctgctatctgcaagagatcttcagcaacgagatggccaaggtggacgacagcttcttccacagactggaagagtccttcctggtggaagaggataagaagcacgagcggcaccccatcttcggcaacatcgtggacgaggtggcctaccacgagaagtaccccaccatctaccacctgagaaagaaactggtggacagcaccgacaaggccgacctgcggctgatctatctggccctggcccacatgatcaagttccggggccacttcctgatcgagggcgacctgaaccccgacaacagcgacgtggacaagctgttcatccagctggtgcagacctacaaccagctgttcgaggaaaaccccatcaacgccagcggcgtggacgccaaggccatcctgtctgccagactgagcaagagcagacggctggaaaatctgatcgcccagctgcccggcgagaagaagaatggcctgttcggcaacctgattgccctgagcctgggcctgacccccaacttcaagagcaacttcgacctggccgaggatgccaaactgcagctgagcaaggacacctacgacgacgacctggacaacctgctggcccagatcggcgaccagtacgccgacctgtttctggccgccaagaacctgtccgacgccatcctgctgagcgacatcctgagagtgaacaccgagatcaccaaggcccccctgagcgcctctatgatcaagagatacgacgagcaccaccaggacctgaccctgctgaaagctctcgtgcggcagcagctgcctgagaagtacaaagagattttcttcgaccagagcaagaacggctacgccggctacatcgatggcggagccagccaggaagagttctacaagttcatcaagcccatcctggaaaagatggacggcaccgaggaactgctcgtgaagctgaacagagaggacctgctgcggaagcagcggaccttcgacaacggcagcatcccccaccagatccacctgggagagctgcacgccattctgcggcggcaggaagatttttacccattcctgaaggacaaccgggaaaagatcgagaagatcctgaccttccgcatcccctactacgtgggccctctggccaggggaaacagcagattcgcctggatgaccagaaagagcgaggaaaccatcaccccctggaacttcgaggaagtggtggacaagggcgccagcgcccagagcttcatcgagcggatgaccaacttcgataagaacctgcccaacgagaaggtgctgcccaagcacagcctgctgtacgagtacttcaccgtgtacaacgagctgaccaaagtgaaatacgtgaccgagggaatgagaaagcccgccttcctgagcggcgagcagaaaaaagccatcgtggacctgctgttcaagaccaaccggaaagtgaccgtgaagcagctgaaagaggactacttcaagaaaatcgagtgcttcgactccgtggaaatctccggcgtggaagatcggttcaacgcctccctgggcacataccacgatctgctgaaaattatcaaggacaaggacttcctggacaatgaggaaaacgaggacattctggaagatatcgtgctgaccctgacactgtttgaggacagagagatgatcgaggaacggctgaaaacctatgcccacctgttcgacgacaaagtgatgaagcagctgaagcggcggagatacaccggctggggcaggctgagccggaagctgatcaacggcatccgggacaagcagtccggcaagacaatcctggatttcctgaagtccgacggcttcgccaacagaaacttcatgcagctgatccacgacgacagcctgacctttaaagaggacatccagaaagcccaggtgtccggccagggcgatagcctgcacgagcacattgccaatctggccggcagccccgccattaagaagggcatcctgcagacagtgaaggtggtggacgagctcgtgaaagtgatgggccggcacaagcccgagaacatcgtgatcgaaatggccagagagaaccagaccacccagaagggacagaagaacagccgcgagagaatgaagcggatcgaagagggcatcaaagagctgggcagccagatcctgaaagaacaccccgtggaaaacacccagctgcagaacgagaagctgtacctgtactacctgcagaatgggcgggatatgtacgtggaccaggaactggacatcaaccggctgtccgactacgatgtggacgctatcgtgcctcagagctttctgaaggacgactccatcgataacaaagtgctgactcggagcgacaagaaccggggcaagagcgacaacgtgccctccgaagaggtcgtgaagaagatgaagaactactggcgccagctgctgaatgccaagctgattacccagaggaagttcgacaatctgaccaaggccgagagaggcggcctgagcgaactggataaggccggcttcatcaagagacagctggtggaaacccggcagatcacaaagcacgtggcacagatcctggactcccggatgaacactaagtacgacgagaacgacaaactgatccgggaagtgaaagtgatcaccctgaagtccaagctggtgtccgatttccggaaggatttccagttttacaaagtgcgcgagatcaacaactaccaccacgcccacgacgcctacctgaacgccgtcgtgggaaccgccctgatcaaaaagtaccctaagctggaaagcgagttcgtgtacggcgactacaaggtgtacgacgtgcggaagatgatcgccaagagcgagcaggaaatcggcaaggctaccgccaagtacttcttctacagcaacatcatgaactttttcaagaccgagattaccctggccaacggcgagatccggaagcggcctctgatcgagacaaacggcgaaacaggcgagatcgtgtgggataagggccgggactttgccaccgtgcggaaagtgctgtctatgccccaagtgaatatcgtgaaaaagaccgaggtgcagacaggcggcttcagcaaagagtctatcctgcccaagaggaacagcgacaagctgatcgccagaaagaaggactgggaccctaagaagtacggcggcttcgacagccccaccgtggcctattctgtgctggtggtggccaaagtggaaaagggcaagtccaagaaactgaagagtgtgaaagagctgctggggatcaccatcatggaaagaagcagcttcgagaagaatcccatcgactttctggaagccaagggctacaaagaagtgaaaaaggacctgatcatcaagctgcctaagtactccctgttcgagctggaaaacggccggaagagaatgctggcctctgccggcgaactgcagaagggaaacgaactggccctgccctccaaatatgtgaacttcctgtacctggccagccactatgagaagctgaagggctcccccgaggataatgagcagaaacagctgtttgtggaacagcacaaacactacctggacgagatcatcgagcagatcagcgagttctccaagagagtgatcctggccgacgctaatctggacaaggtgctgagcgcctacaacaagcacagagacaagcctatcagagagcaggccgagaatatcatccacctgtttaccctgaccaatctgggagcccctgccgccttcaagtactttgacaccaccatcgaccggaagaggtacaccagcaccaaagaggtgctggacgccaccctgatccaccagagcatcaccggcctgtacgagacacggatcgacctgtctcagctgggaggcgacgcctatccctatgacgtgcccgattatgccagcctgggcagcggctcccccaagaaaaaacgcaaggtggaagatcctaagaaaaagcggaaagtggacggcagcggcagcgagacccccggtaccagcgagagcgccacccccgagagccggacactcgagatggcggcagccgaggccgcgaactgcatcatggagaattttgtagccaccttggctaatgggatgagcctccagccgcctcttgaagaagtgtcctgtggccaggcggaaagcagtgagaagcccaacgctgaggacatgacatccaaagattactactttgactcctacgcacactttggcatccacgaggagatgctgaaggacgaggtgcgcaccctcacttaccgcaactccatgtttcataaccggcacctcttcaaggacaaggtggtgctggacgtcggctcgggcaccggcatcctctgcatgtttgctgccaaggccggggcccgcaaggtcatcgggatcgagtgttccagtatctctgattatgcggtgaagatcgtcaaagccaacaagttagaccacgtggtgaccatcatcaaggggaaggtggaggaggtggagctcccagtggagaaggtggacatcatcatcagcgagtggatgggctactgcctcttctacgagtccatgctcaacaccgtgctctatgcccgggacaagtggctggcgcccgatggcctcatcttcccagaccgggccacgctgtatgtgacggccatcgaggaccggcagtacaaagactacaagatccactggtgggagaacgtgtatggcttcgacatgtcttgcatcaaagatgtggccattaaggagcccctagtggatgtcgtggaccccaaacagctggtcaccaacgcctgcctcataaaggaggtggacatctataccgtcaaggtggaagacctgaccttcacctccccgttctgcctgcaagtgaagcggaatgactacgtgcacgccctggtggcctacttcaacatcgagttcacacgctgccacaagaggaccggcttctccaccagccccgagtccccgtacacgcactggaagcagacggtgttctacatggaggactacctgaccgtgaagacgggcgaggagatcttcggcaccatcggcatgcggcccaacgccaagaacaaccgggacctggacttcaccatcgacctggacttcaagggccagctgtgcgagctgtcctgctccaccgactaccggatgcgctgagatcccaagcacgcagcaatgcagctcaaaacgcttagcctagccacacccccacgggaaacagcagtgattaacctttagcaataaacgaaagtttaactaagctatactaaccccagggttggtcaatttcgtgccagccacaccctggtactgcatgcacgcaatgctagctgcccctttcccgtcctgggcaccccgagtctcccccgaccccgggtcccaggtatgctcccacctccacctgccccactcaccacctctgctagttccagacacctccgagacgagg

SEQ ID NO: 322 - RNA, 8380 nt, synthetic construct
  misc_feature 1..8380: note = V70 mRNA
  source 1..8380: mol_type = other RNA
aggactcactatttgttttcgcgcccagttgcaaaaagtgtcgacatttgcttctgacacaactgtgttcactagcaacctcaaacagacaccgccaccatgcctgctgctaagagagtgaaactggatggatccaccggtccagccaccatgaaccatgaccaggaatttgaccccccaaaggtttacccacctgtgccagctgagaagaggaagcccatccgcgtgctgtctctctttgatgggattgctacagggctcctggtgctgaaggacctgggcatccaagtggaccgctacattgcctccgaggtgtgtgaggactccatcacggtgggcatggtgcggcaccagggaaagatcatgtacgtcggggacgtccgcagcgtcacacagaagcatatccaggagtggggcccattcgacctggtgattggaggcagtccctgcaatgacctctccattgtcaaccctgcccgcaagggactttatgagggtactggccgcctcttctttgagttctaccgcctcctgcatgatgcgcggcccaaggagggagatgatcgccccttcttctggctctttgagaatgtggtggccatgggcgttagtgacaagagggacatctcgcgatttcttgagtctaaccccgtgatgattgacgccaaagaagtgtctgctgcacacagggcccgttacttctggggtaaccttcctggcatgaacaggcctttggcatccactgtgaatgataagctggagctgcaagagtgtctggagcacggcagaatagccaagttcagcaaagtgaggaccattaccaccaggtcaaactctataaagcagggcaaagaccagcatttccccgtcttcatgaacgagaaggaggacatcctgtggtgcactgaaatggaaagggtgtttggcttccccgtccactacacagacgtctccaacatgagccgcttggcgaggcagagactgctgggccgatcgtggagcgtgccggtcatccgccacctcttcgctccgctgaaggaatattttgcttgtgtgtctagcggcaatagtaacgctaacagccgcgggccgagcttcagcagcggcctggtgccgttaagcttgcgcggcagccatatgggccctatggagatatacaagacagtgtctgcatggaagagacagccagtgcgggtactgagcctcttcagaaacatcgacaaggtactaaagagtttgggcttcttggaaagcggttctggttctgggggaggaacgctgaagtacgtggaagatgtcacaaatgtcgtgaggagagacgtggagaaatggggcccctttgacctggtgtacggctcgacgcagcccctaggcagctcttgtgatcgctgtcccggctggtacatgttccagttccaccggatcctgcagtatgcgctgcctcgccaggagagtcagcggcccttcttctggatattcatggacaatctgctgctgactgaggatgaccaagagacaactacccgcttccttcagacagaggctgtgaccctccaggatgtccgtggcagagactaccagaatgctatgcgggtgtggagcaacattccagggctgaagagcaagcatgcgcccctgaccccaaaggaagaagagtatctgcaagcccaagtcagaagcaggagcaagctggacgccccgaaagttgacctcctggtgaagaactgccttctcccgctgagagagtacttcaagtatttttctcaaaactcacttcctcttggagggccgagctctggcgcacccccaccaagtggagggtctcctgccgggtccccaacatctactgaagaaggcaccagcgaatccgcaacgcccgagtcaggccctggtacctccacagaaccatctgaaggtagtgcgcctggttccccagctggaagccctacttccaccgaagaaggcacgtcaaccgaaccaagtgaaggatctgcccctgggaccagcactgaaccatctgagccaaaaaagaagagaaaggtaatggacaagaagtacagcatcggcctggccatcggcaccaactctgtgggctgggccgtgatcaccgacgagtacaaggtgcccagcaagaaattcaaggtgctgggcaacaccgaccggcacagcatcaagaagaacctgatcggcgccctgctgttcgacagcggagaaacagccgaggccacccggctgaagagaaccgccagaagaagatacaccagacggaagaaccggatctgctatctgcaagagatcttcagcaacgagatggccaaggtggacgacagcttcttccacagactggaagagtccttcctggtggaagaggataagaagcacgagcggcaccccatcttcggcaacatcgtggacgaggtggcctaccacgagaagtaccccaccatctaccacctgagaaagaaactggtggacagcaccgacaaggccgacctgcggctgatctatctggccctggcccacatgatcaagttccggggccacttcctgatcgagggcgacctgaaccccgacaacagcgacgtggacaagctgttcatccagctggtgcagacctacaaccagctgttcgaggaaaaccccatcaacgccagcggcgtggacgccaaggccatcctgtctgccagactgagcaagagcagacggctggaaaatctgatcgcccagctgcccggcgagaagaagaatggcctgttcggcaacctgattgccctgagcctgggcctgacccccaacttcaagagcaacttcgacctggccgaggatgccaaactgcagctgagcaaggacacctacgacgacgacctggacaacctgctggcccagatcggcgaccagtacgccgacctgtttctggccgccaagaacctgtccgacgccatcctgctgagcgacatcctgagagtgaacaccgagatcaccaaggcccccctgagcgcctctatgatcaagagatacgacgagcaccaccaggacctgaccctgctgaaagctctcgtgcggcagcagctgcctgagaagtacaaagagattttcttcgaccagagcaagaacggctacgccggctacatcgatggcggagccagccaggaagagttctacaagttcatcaagcccatcctggaaaagatggacggcaccgaggaactgctcgtgaagctgaacagagaggacctgctgcggaagcagcggaccttcgacaacggcagcatcccccaccagatccacctgggagagctgcacgccattctgcggcggcaggaagatttttacccattcctgaaggacaaccgggaaaagatcgagaagatcctgaccttccgcatcccctactacgtgggccctctggccaggggaaacagcagattcgcctggatgaccagaaagagcgaggaaaccatcaccccctggaacttcgaggaagtggtggacaagggcgccagcgcccagagcttcatcgagcggatgaccaacttcgataagaacctgcccaacgagaaggtgctgcccaagcacagcctgctgtacgagtacttcaccgtgtacaacgagctgaccaaagtgaaatacgtgaccgagggaatgagaaagcccgccttcctgagcggcgagcagaaaaaagccatcgtggacctgctgttcaagaccaaccggaaagtgaccgtgaagcagctgaaagaggactacttcaagaaaatcgagtgcttcgactccgtggaaatctccggcgtggaagatcggttcaacgcctccctgggcacataccacgatctgctgaaaattatcaaggacaaggacttcctggacaatgaggaaaacgaggacattctggaagatatcgtgctgaccctgacactgtttgaggacagagagatgatcgaggaacggctgaaaacctatgcccacctgttcgacgacaaagtgatgaagcagctgaagcggcggagatacaccggctggggcaggctgagccggaagctgatcaacggcatccgggacaagcagtccggcaagacaatcctggatttcctgaagtccgacggcttcgccaacagaaacttcatgcagctgatccacgacgacagcctgacctttaaagaggacatccagaaagcccaggtgtccggccagggcgatagcctgcacgagcacattgccaatctggccggcagccccgccattaagaagggcatcctgcagacagtgaaggtggtggacgagctcgtgaaagtgatgggccggcacaagcccgagaacatcgtgatcgaaatggccagagagaaccagaccacccagaagggacagaagaacagccgcgagagaatgaagcggatcgaagagggcatcaaagagctgggcagccagatcctgaaagaacaccccgtggaaaacacccagctgcagaacgagaagctgtacctgtactacctgcagaatgggcgggatatgtacgtggaccaggaactggacatcaaccggctgtccgactacgatgtggacgctatcgtgcctcagagctttctgaaggacgactccatcgataacaaagtgctgactcggagcgacaagaaccggggcaagagcgacaacgtgccctccgaagaggtcgtgaagaagatgaagaactactggcgccagctgctgaatgccaagctgattacccagaggaagttcgacaatctgaccaaggccgagagaggcggcctgagcgaactggataaggccggcttcatcaagagacagctggtggaaacccggcagatcacaaagcacgtggcacagatcctggactcccggatgaacactaagtacgacgagaacgacaaactgatccgggaagtgaaagtgatcaccctgaagtccaagctggtgtccgatttccggaaggatttccagttttacaaagtgcgcgagatcaacaactaccaccacgcccacgacgcctacctgaacgccgtcgtgggaaccgccctgatcaaaaagtaccctaagctggaaagcgagttcgtgtacggcgactacaaggtgtacgacgtgcggaagatgatcgccaagagcgagcaggaaatcggcaaggctaccgccaagtacttcttctacagcaacatcatgaactttttcaagaccgagattaccctggccaacggcgagatccggaagcggcctctgatcgagacaaacggcgaaacaggcgagatcgtgtgggataagggccgggactttgccaccgtgcggaaagtgctgtctatgccccaagtgaatatcgtgaaaaagaccgaggtgcagacaggcggcttcagcaaagagtctatcctgcccaagaggaacagcgacaagctgatcgccagaaagaaggactgggaccctaagaagtacggcggcttcgacagccccaccgtggcctattctgtgctggtggtggccaaagtggaaaagggcaagtccaagaaactgaagagtgtgaaagagctgctggggatcaccatcatggaaagaagcagcttcgagaagaatcccatcgactttctggaagccaagggctacaaagaagtgaaaaaggacctgatcatcaagctgcctaagtactccctgttcgagctggaaaacggccggaagagaatgctggcctctgccggcgaactgcagaagggaaacgaactggccctgccctccaaatatgtgaacttcctgtacctggccagccactatgagaagctgaagggctcccccgaggataatgagcagaaacagctgtttgtggaacagcacaaacactacctggacgagatcatcgagcagatcagcgagttctccaagagagtgatcctggccgacgctaatctggacaaggtgctgagcgcctacaacaagcacagagacaagcctatcagagagcaggccgagaatatcatccacctgtttaccctgaccaatctgggagcccctgccgccttcaagtactttgacaccaccatcgaccggaagaggtacaccagcaccaaagaggtgctggacgccaccctgatccaccagagcatcaccggcctgtacgagacacggatcgacctgtctcagctgggaggcgacgcctatccctatgacgtgcccgattatgccagcctgggcagcggctcccccaagaaaaaacgcaaggtggaagatcctaagaaaaagcggaaagtggacggcagcggcagcgagacccccggtaccagcgagagcgccacccccgagagccggacactcgagacccctccaccccaggtggcctacagcaaggaacgtatcccgggcaagggtgttttcattaacacaggccctgaatttctggttggctgtgactgcaaggatgggtgtcgggacaagtccaagtgtgcctgccatcaactaactatccaggctacagcctgtaccccaggaggccaaatcaaccctaactctggctaccagtacaagagactagaagagtgtctacccacaggggtatatgagtgtaacaaacgctgcaaatgtgacccaaacatgtgcacaaaccggttggtgcaacatggactacaagttcggctacagctattcaagacacagaacaagggctggggtatccgctgcttggatgacattgccaaaggctcttttgtttgtatttatgcaggcaaaatcctgacagatgactttgcagacaaggagggtctggaaatgggtgatgagtactttgcaaatctggaccatatcgagagcgtggagaacttcaaagaaggatatgagagtgatgccccctgttcctctgacagcagtggtgtagacttgaaggaccaggaagatggcaacagcggtacagaggaccctgaagagtccaatgatgatagctcagatgataacttctgtaaggatgaggacttcagcaccagttcagtgtggcggagctatgctacccggaggcagacccggggccagaaagagaacggactctctgagacaacttccaaggactcccaccccccagatcttggacccccacatattcctgttcctccctcaatccctgtaggtggctgcaatccaccttcctccgaagagacacccaagaacaaggtggcctcatggttgagctgcaatagtgtcagtgaaggtggttttgctgactctgatagccattcatccttcaagactaatgaaggtggggagggccgggctgggggaagccgaatggaggctgagaaggcctccacctcaggactaggcatcaaggatgagggagacatcaaacaggccaagaaagaggacactgacgaccgaaacaagatgtcagtagttactgaaagctctcgaaattacggttacaatccttctcctgtgaagcctgaaggacttcgccgcccacctagtaagactagtatgcatcaaagccgaagactcatggcttctgctcagtccaaccctgatgatgtcctgacactgtccagcagcacagaaagtgagggggaaagtgggaccagccgaaagcccactgctggtcagacttcggctacagcggttgacagtgatgatatccagaccatatcctctggctctgaaggggatgactttgaggacaagaagaacatgactggtccaatgaagcgtcaagtggcagtaaaatcaacccgaggctttgctcttaaatcaacccatgggattgcaattaaatcaaccaacatggcctctgtggacaagggggagagcgcacctgttcgtaagaacacacgccaattctatgatggcgaggagtcttgctacatcattgatgccaagcttgaaggcaacctgggccgctacctcaaccacagttgcagccccaacctgtttgtccagaatgtcttcgtggatacccatgatcttcgcttcccctgggtggccttctttgccagcaaaagaatccgggctgggacagaacttacttgggactacaactacgaggtgggcagtgtggaaggcaaggagctactctgttgctgtggggccattgaatgcagaggacgtcttctttgagatcccaagcacgcagcaatgcagctcaaaacgcttagcctagccacacccccacgggaaacagcagtgattaacctttagcaataaacgaaagtttaactaagctatactaaccccagggttggtcaatttcgtgccagccacaccctggtactgcatgcacgcaatgctagctgcccctttcccgtcctgggcaccccgagtctcccccgaccccgggtcccaggtatgctcccacctccacctgccccactcaccacctctgctagttccagacacctccgagacgagg

SEQ ID NO: 323 - RNA, 7507 nt, synthetic construct
  misc_feature 1..7507: note = V71 mRNA
  source 1..7507: mol_type = other RNA
aggactcactatttgttttcgcgcccagttgcaaaaagtgtcgacatttgcttctgacacaactgtgttcactagcaacctcaaacagacaccgccaccatgcctgctgctaagagagtgaaactggatggatccaccggtccagccaccatgaaccatgaccaggaatttgaccccccaaaggtttacccacctgtgccagctgagaagaggaagcccatccgcgtgctgtctctctttgatgggattgctacagggctcctggtgctgaaggacctgggcatccaagtggaccgctacattgcctccgaggtgtgtgaggactccatcacggtgggcatggtgcggcaccagggaaagatcatgtacgtcggggacgtccgcagcgtcacacagaagcatatccaggagtggggcccattcgacctggtgattggaggcagtccctgcaatgacctctccattgtcaaccctgcccgcaagggactttatgagggtactggccgcctcttctttgagttctaccgcctcctgcatgatgcgcggcccaaggagggagatgatcgccccttcttctggctctttgagaatgtggtggccatgggcgttagtgacaagagggacatctcgcgatttcttgagtctaaccccgtgatgattgacgccaaagaagtgtctgctgcacacagggcccgttacttctggggtaaccttcctggcatgaacaggcctttggcatccactgtgaatgataagctggagctgcaagagtgtctggagcacggcagaatagccaagttcagcaaagtgaggaccattaccaccaggtcaaactctataaagcagggcaaagaccagcatttccccgtcttcatgaacgagaaggaggacatcctgtggtgcactgaaatggaaagggtgtttggcttccccgtccactacacagacgtctccaacatgagccgcttggcgaggcagagactgctgggccgatcgtggagcgtgccggtcatccgccacctcttcgctccgctgaaggaatattttgcttgtgtgtctagcggcaatagtaacgctaacagccgcgggccgagcttcagcagcggcctggtgccgttaagcttgcgcggcagccatatgggccctatggagatatacaagacagtgtctgcatggaagagacagccagtgcgggtactgagcctcttcagaaacatcgacaaggtactaaagagtttgggcttcttggaaagcggttctggttctgggggaggaacgctgaagtacgtggaagatgtcacaaatgtcgtgaggagagacgtggagaaatggggcccctttgacctggtgtacggctcgacgcagcccctaggcagctcttgtgatcgctgtcccggctggtacatgttccagttccaccggatcctgcagtatgcgctgcctcgccaggagagtcagcggcccttcttctggatattcatggacaatctgctgctgactgaggatgaccaagagacaactacccgcttccttcagacagaggctgtgaccctccaggatgtccgtggcagagactaccagaatgctatgcgggtgtggagcaacattccagggctgaagagcaagcatgcgcccctgaccccaaaggaagaagagtatctgcaagcccaagtcagaagcaggagcaagctggacgccccgaaagttgacctcctggtgaagaactgccttctcccgctgagagagtacttcaagtatttttctcaaaactcacttcctcttggagggccgagctctggcgcacccccaccaagtggagggtctcctgccgggtccccaacatctactgaagaaggcaccagcgaatccgcaacgcccgagtcaggccctggtacctccacagaaccatctgaaggtagtgcgcctggttccccagctggaagccctacttccaccgaagaaggcacgtcaaccgaaccaagtgaaggatctgcccctgggaccagcactgaaccatctgagccaaaaaagaagagaaaggtaatggacaagaagtacagcatcggcctggccatcggcaccaactctgtgggctgggccgtgatcaccgacgagtacaaggtgcccagcaagaaattcaaggtgctgggcaacaccgaccggcacagcatcaagaagaacctgatcggcgccctgctgttcgacagcggagaaacagccgaggccacccggctgaagagaaccgccagaagaagatacaccagacggaagaaccggatctgctatctgcaagagatcttcagcaacgagatggccaaggtggacgacagcttcttccacagactggaagagtccttcctggtggaagaggataagaagcacgagcggcaccccatcttcggcaacatcgtggacgaggtggcctaccacgagaagtaccccaccatctaccacctgagaaagaaactggtggacagcaccgacaaggccgacctgcggctgatctatctggccctggcccacatgatcaagttccggggccacttcctgatcgagggcgacctgaaccccgacaacagcgacgtggacaagctgttcatccagctggtgcagacctacaaccagctgttcgaggaaaaccccatcaacgccagcggcgtggacgccaaggccatcctgtctgccagactgagcaagagcagacggctggaaaatctgatcgcccagctgcccggcgagaagaagaatggcctgttcggcaacctgattgccctgagcctgggcctgacccccaacttcaagagcaacttcgacctggccgaggatgccaaactgcagctgagcaaggacacctacgacgacgacctggacaacctgctggcccagatcggcgaccagtacgccgacctgtttctggccgccaagaacctgtccgacgccatcctgctgagcgacatcctgagagtgaacaccgagatcaccaaggcccccctgagcgcctctatgatcaagagatacgacgagcaccaccaggacctgaccctgctgaaagctctcgtgcggcagcagctgcctgagaagtacaaagagattttcttcgaccagagcaagaacggctacgccggctacatcgatggcggagccagccaggaagagttctacaagttcatcaagcccatcctggaaaagatggacggcaccgaggaactgctcgtgaagctgaacagagaggacctgctgcggaagcagcggaccttcgacaacggcagcatcccccaccagatccacctgggagagctgcacgccattctgcggcggcaggaagatttttacccattcctgaaggacaaccgggaaaagatcgagaagatcctgaccttccgcatcccctactacgtgggccctctggccaggggaaacagcagattcgcctggatgaccagaaagagcgaggaaaccatcaccccctggaacttcgaggaagtggtggacaagggcgccagcgcccagagcttcatcgagcggatgaccaacttcgataagaacctgcccaacgagaaggtgctgcccaagcacagcctgctgtacgagtacttcaccgtgtacaacgagctgaccaaagtgaaatacgtgaccgagggaatgagaaagcccgccttcctgagcggcgagcagaaaaaagccatcgtggacctgctgttcaagaccaaccggaaagtgaccgtgaagcagctgaaagaggactacttcaagaaaatcgagtgcttcgactccgtggaaatctccggcgtggaagatcggttcaacgcctccctgggcacataccacgatctgctgaaaattatcaaggacaaggacttcctggacaatgaggaaaacgaggacattctggaagatatcgtgctgaccctgacactgtttgaggacagagagatgatcgaggaacggctgaaaacctatgcccacctgttcgacgacaaagtgatgaagcagctgaagcggcggagatacaccggctggggcaggctgagccggaagctgatcaacggcatccgggacaagcagtccggcaagacaatcctggatttcctgaagtccgacggcttcgccaacagaaacttcatgcagctgatccacgacgacagcctgacctttaaagaggacatccagaaagcccaggtgtccggccagggcgatagcctgcacgagcacattgccaatctggccggcagccccgccattaagaagggcatcctgcagacagtgaaggtggtggacgagctcgtgaaagtgatgggccggcacaagcccgagaacatcgtgatcgaaatggccagagagaaccagaccacccagaagggacagaagaacagccgcgagagaatgaagcggatcgaagagggcatcaaagagctgggcagccagatcctgaaagaacaccccgtggaaaacacccagctgcagaacgagaagctgtacctgtactacctgcagaatgggcgggatatgtacgtggaccaggaactggacatcaaccggctgtccgactacgatgtggacgctatcgtgcctcagagctttctgaaggacgactccatcgataacaaagtgctgactcggagcgacaagaaccggggcaagagcgacaacgtgccctccgaagaggtcgtgaagaagatgaagaactactggcgccagctgctgaatgccaagctgattacccagaggaagttcgacaatctgaccaaggccgagagaggcggcctgagcgaactggataaggccggcttcatcaagagacagctggtggaaacccggcagatcacaaagcacgtggcacagatcctggactcccggatgaacactaagtacgacgagaacgacaaactgatccgggaagtgaaagtgatcaccctgaagtccaagctggtgtccgatttccggaaggatttccagttttacaaagtgcgcgagatcaacaactaccaccacgcccacgacgcctacctgaacgccgtcgtgggaaccgccctgatcaaaaagtaccctaagctggaaagcgagttcgtgtacggcgactacaaggtgtacgacgtgcggaagatgatcgccaagagcgagcaggaaatcggcaaggctaccgccaagtacttcttctacagcaacatcatgaactttttcaagaccgagattaccctggccaacggcgagatccggaagcggcctctgatcgagacaaacggcgaaacaggcgagatcgtgtgggataagggccgggactttgccaccgtgcggaaagtgctgtctatgccccaagtgaatatcgtgaaaaagaccgaggtgcagacaggcggcttcagcaaagagtctatcctgcccaagaggaacagcgacaagctgatcgccagaaagaaggactgggaccctaagaagtacggcggcttcgacagccccaccgtggcctattctgtgctggtggtggccaaagtggaaaagggcaagtccaagaaactgaagagtgtgaaagagctgctggggatcaccatcatggaaagaagcagcttcgagaagaatcccatcgactttctggaagccaagggctacaaagaagtgaaaaaggacctgatcatcaagctgcctaagtactccctgttcgagctggaaaacggccggaagagaatgctggcctctgccggcgaactgcagaagggaaacgaactggccctgccctccaaatatgtgaacttcctgtacctggccagccactatgagaagctgaagggctcccccgaggataatgagcagaaacagctgtttgtggaacagcacaaacactacctggacgagatcatcgagcagatcagcgagttctccaagagagtgatcctggccgacgctaatctggacaaggtgctgagcgcctacaacaagcacagagacaagcctatcagagagcaggccgagaatatcatccacctgtttaccctgaccaatctgggagcccctgccgccttcaagtactttgacaccaccatcgaccggaagaggtacaccagcaccaaagaggtgctggacgccaccctgatccaccagagcatcaccggcctgtacgagacacggatcgacctgtctcagctgggaggcgacgcctatccctatgacgtgcccgattatgccagcctgggcagcggctcccccaagaaaaaacgcaaggtggaagatcctaagaaaaagcggaaagtggacggcagcggcagcgagacccccggtaccagcgagagcgccacccccgagagccggacactcgagacaattcttaaagatttattgccggaaacaatacctccacctgagttggatgatatgacactgtggcagattgttattaatatcctttcagaaccaccaaaaaggaaaaaaagaaaagatattaatacaattgaagatgctgtgaaattactgcaagagtgcaaaaaaattatagttctaactggagctggggtgtctgtttcatgtggaatacctgacttcaggtcaagggatggtatttatgctcgccttgctgtagacttcccagatcttccagatcctcaagcgatgtttgatattgaatatttcagaaaagatccaagaccattcttcaagtttgcaaaggaaatatatcctggacaattccagccatctctctgtcacaaattcatagccttgtcagataaggaaggaaaactacttcgcaactatacccagaacatagacacgctggaacaggttgcgggaatccaaaggataattcagtgtcatggttcctttgcaacagcatcttgcctgatttgtaaatacaaagttgactgtgaagctgtacgaggagatatttttaatcaggtagttcctcgatgtcctaggtgcccagctgatgaaccgcttgctatcatgaaaccagagattgtgttttttggtgaaaatttaccagaacagtttcatagagccatgaagtatgacaaagatgaagttgacctcctcattgttattgggtcttccctcaaagtaagaccagtagcactaattccaagttccataccccatgaagtgcctcagatattaattaatagagaacctttgcctcatctgcattttgatgtagagcttcttggagactgtgatgtcataattaatgaattgtgtcataggttaggtggtgaatatgccaaactttgagatcccaagcacgcagcaatgcagctcaaaacgcttagcctagccacacccccacgggaaacagcagtgattaacctttagcaataaacgaaagtttaactaagctatactaaccccagggttggtcaatttcgtgccagccacaccctggtactgcatgcacgcaatgctagctgcccctttcccgtcctgggcaccccgagtctcccccgaccccgggtcccaggtatgctcccacctccacctgccccactcaccacctctgctagttccagacacctccgagacgagg

SEQ ID NO: 324 - RNA, 8515 nt, synthetic construct
  misc_feature 1..8515: note = V72 mRNA
  source 1..8515: mol_type = other RNA
aggactcactatttgttttcgcgcccagttgcaaaaagtgtcgacatttgcttctgacacaactgtgttcactagcaacctcaaacagacaccgccaccatgcctgctgctaagagagtgaaactggatggatccaccggtccagccaccatgaaccatgaccaggaatttgaccccccaaaggtttacccacctgtgccagctgagaagaggaagcccatccgcgtgctgtctctctttgatgggattgctacagggctcctggtgctgaaggacctgggcatccaagtggaccgctacattgcctccgaggtgtgtgaggactccatcacggtgggcatggtgcggcaccagggaaagatcatgtacgtcggggacgtccgcagcgtcacacagaagcatatccaggagtggggcccattcgacctggtgattggaggcagtccctgcaatgacctctccattgtcaaccctgcccgcaagggactttatgagggtactggccgcctcttctttgagttctaccgcctcctgcatgatgcgcggcccaaggagggagatgatcgccccttcttctggctctttgagaatgtggtggccatgggcgttagtgacaagagggacatctcgcgatttcttgagtctaaccccgtgatgattgacgccaaagaagtgtctgctgcacacagggcccgttacttctggggtaaccttcctggcatgaacaggcctttggcatccactgtgaatgataagctggagctgcaagagtgtctggagcacggcagaatagccaagttcagcaaagtgaggaccattaccaccaggtcaaactctataaagcagggcaaagaccagcatttccccgtcttcatgaacgagaaggaggacatcctgtggtgcactgaaatggaaagggtgtttggcttccccgtccactacacagacgtctccaacatgagccgcttggcgaggcagagactgctgggccgatcgtggagcgtgccggtcatccgccacctcttcgctccgctgaaggaatattttgcttgtgtgtctagcggcaatagtaacgctaacagccgcgggccgagcttcagcagcggcctggtgccgttaagcttgcgcggcagccatatgggccctatggagatatacaagacagtgtctgcatggaagagacagccagtgcgggtactgagcctcttcagaaacatcgacaaggtactaaagagtttgggcttcttggaaagcggttctggttctgggggaggaacgctgaagtacgtggaagatgtcacaaatgtcgtgaggagagacgtggagaaatggggcccctttgacctggtgtacggctcgacgcagcccctaggcagctcttgtgatcgctgtcccggctggtacatgttccagttccaccggatcctgcagtatgcgctgcctcgccaggagagtcagcggcccttcttctggatattcatggacaatctgctgctgactgaggatgaccaagagacaactacccgcttccttcagacagaggctgtgaccctccaggatgtccgtggcagagactaccagaatgctatgcgggtgtggagcaacattccagggctgaagagcaagcatgcgcccctgaccccaaaggaagaagagtatctgcaagcccaagtcagaagcaggagcaagctggacgccccgaaagttgacctcctggtgaagaactgccttctcccgctgagagagtacttcaagtatttttctcaaaactcacttcctcttggagggccgagctctggcgcacccccaccaagtggagggtctcctgccgggtccccaacatctactgaagaaggcaccagcgaatccgcaacgcccgagtcaggccctggtacctccacagaaccatctgaaggtagtgcgcctggttccccagctggaagccctacttccaccgaagaaggcacgtcaaccgaaccaagtgaaggatctgcccctgggaccagcactgaaccatctgagccaaaaaagaagagaaaggtaatggacaagaagtacagcatcggcctggccatcggcaccaactctgtgggctgggccgtgatcaccgacgagtacaaggtgcccagcaagaaattcaaggtgctgggcaacaccgaccggcacagcatcaagaagaacctgatcggcgccctgctgttcgacagcggagaaacagccgaggccacccggctgaagagaaccgccagaagaagatacaccagacggaagaaccggatctgctatctgcaagagatcttcagcaacgagatggccaaggtggacgacagcttcttccacagactggaagagtccttcctggtggaagaggataagaagcacgagcggcaccccatcttcggcaacatcgtggacgaggtggcctaccacgagaagtaccccaccatctaccacctgagaaagaaactggtggacagcaccgacaaggccgacctgcggctgatctatctggccctggcccacatgatcaagttccggggccacttcctgatcgagggcgacctgaaccccgacaacagcgacgtggacaagctgttcatccagctggtgcagacctacaaccagctgttcgaggaaaaccccatcaacgccagcggcgtggacgccaaggccatcctgtctgccagactgagcaagagcagacggctggaaaatctgatcgcccagctgcccggcgagaagaagaatggcctgttcggcaacctgattgccctgagcctgggcctgacccccaacttcaagagcaacttcgacctggccgaggatgccaaactgcagctgagcaaggacacctacgacgacgacctggacaacctgctggcccagatcggcgaccagtacgccgacctgtttctggccgccaagaacctgtccgacgccatcctgctgagcgacatcctgagagtgaacaccgagatcaccaaggcccccctgagcgcctctatgatcaagagatacgacgagcaccaccaggacctgaccctgctgaaagctctcgtgcggcagcagctgcctgagaagtacaaagagattttcttcgaccagagcaagaacggctacgccggctacatcgatggcggagccagccaggaagagttctacaagttcatcaagcccatcctggaaaagatggacggcaccgaggaactgctcgtgaagctgaacagagaggacctgctgcggaagcagcggaccttcgacaacggcagcatcccccaccagatccacctgggagagctgcacgccattctgcggcggcaggaagatttttacccattcctgaaggacaaccgggaaaagatcgagaagatcctgaccttccgcatcccctactacgtgggccctctggccaggggaaacagcagattcgcctggatgaccagaaagagcgaggaaaccatcaccccctggaacttcgaggaagtggtggacaagggcgccagcgcccagagcttcatcgagcggatgaccaacttcgataagaacctgcccaacgagaaggtgctgcccaagcacagcctgctgtacgagtacttcaccgtgtacaacgagctgaccaaagtgaaatacgtgaccgagggaatgagaaagcccgccttcctgagcggcgagcagaaaaaagccatcgtggacctgctgttcaagaccaaccggaaagtgaccgtgaagcagctgaaagaggactacttcaagaaaatcgagtgcttcgactccgtggaaatctccggcgtggaagatcggttcaacgcctccctgggcacataccacgatctgctgaaaattatcaaggacaaggacttcctggacaatgaggaaaacgaggacattctggaagatatcgtgctgaccctgacactgtttgaggacagagagatgatcgaggaacggctgaaaacctatgcccacctgttcgacgacaaagtgatgaagcagctgaagcggcggagatacaccggctggggcaggctgagccggaagctgatcaacggcatccgggacaagcagtccggcaagacaatcctggatttcctgaagtccgacggcttcgccaacagaaacttcatgcagctgatccacgacgacagcctgacctttaaagaggacatccagaaagcccaggtgtccggccagggcgatagcctgcacgagcacattgccaatctggccggcagccccgccattaagaagggcatcctgcagacagtgaaggtggtggacgagctcgtgaaagtgatgggccggcacaagcccgagaacatcgtgatcgaaatggccagagagaaccagaccacccagaagggacagaagaacagccgcgagagaatgaagcggatcgaagagggcatcaaagagctgggcagccagatcctgaaagaacaccccgtggaaaacacccagctgcagaacgagaagctgtacctgtactacctgcagaatgggcgggatatgtacgtggaccaggaactggacatcaaccggctgtccgactacgatgtggacgctatcgtgcctcagagctttctgaaggacgactccatcgataacaaagtgctgactcggagcgacaagaaccggggcaagagcgacaacgtgccctccgaagaggtcgtgaagaagatgaagaactactggcgccagctgctgaatgccaagctgattacccagaggaagttcgacaatctgaccaaggccgagagaggcggcctgagcgaactggataaggccggcttcatcaagagacagctggtggaaacccggcagatcacaaagcacgtggcacagatcctggactcccggatgaacactaagtacgacgagaacgacaaactgatccgggaagtgaaagtgatcaccctgaagtccaagctggtgtccgatttccggaaggatttccagttttacaaagtgcgcgagatcaacaactaccaccacgcccacgacgcctacctgaacgccgtcgtgggaaccgccctgatcaaaaagtaccctaagctggaaagcgagttcgtgtacggcgactacaaggtgtacgacgtgcggaagatgatcgccaagagcgagcaggaaatcggcaaggctaccgccaagtacttcttctacagcaacatcatgaactttttcaagaccgagattaccctggccaacggcgagatccggaagcggcctctgatcgagacaaacggcgaaacaggcgagatcgtgtgggataagggccgggactttgccaccgtgcggaaagtgctgtctatgccccaagtgaatatcgtgaaaaagaccgaggtgcagacaggcggcttcagcaaagagtctatcctgcccaagaggaacagcgacaagctgatcgccagaaagaaggactgggaccctaagaagtacggcggcttcgacagccccaccgtggcctattctgtgctggtggtggccaaagtggaaaagggcaagtccaagaaactgaagagtgtgaaagagctgctggggatcaccatcatggaaagaagcagcttcgagaagaatcccatcgactttctggaagccaagggctacaaagaagtgaaaaaggacctgatcatcaagctgcctaagtactccctgttcgagctggaaaacggccggaagagaatgctggcctctgccggcgaactgcagaagggaaacgaactggccctgccctccaaatatgtgaacttcctgtacctggccagccactatgagaagctgaagggctcccccgaggataatgagcagaaacagctgtttgtggaacagcacaaacactacctggacgagatcatcgagcagatcagcgagttctccaagagagtgatcctggccgacgctaatctggacaaggtgctgagcgcctacaacaagcacagagacaagcctatcagagagcaggccgagaatatcatccacctgtttaccctgaccaatctgggagcccctgccgccttcaagtactttgacaccaccatcgaccggaagaggtacaccagcaccaaagaggtgctggacgccaccctgatccaccagagcatcaccggcctgtacgagacacggatcgacctgtctcagctgggaggcgacgcctatccctatgacgtgcccgattatgccagcctgggcagcggctcccccaagaaaaaacgcaaggtggaagatcctaagaaaaagcggaaagtggacggcagcggcagcgagacccccggtaccagcgagagcgccacccccgagagccggacactcgagatggcggcgatggcggtcgggggtgctggtgggagccgcgtgtccagcgggagggacctgaattgcgtccccgaaatagctgacacactaggggctgtggccaagcaggggtttgatttcctctgcatgcctgtcttccatccgcgtttcaagagggagttcattcaggaacctgctaagaatcggcccggtccccagacacgatcagacctactgctgtcaggaagggactggaatacgctaattgtgggaaagctttctccatggattcgtccagactcaaaagtggagaagattcgcaggaactccgaggcggccatgttacaggagctgaattttggtgcatatttgggtcttccagctttcctgctgccccttaatcaggaagataacaccaacctggccagagttttgaccaaccacatccacactggccatcactcttccatgttctggatgcgggtacccttggtggcaccagaggacctgagagatgatataattgagaatgcaccaactacacacacagaggagtacagtggggaggagaaaacgtggatgtggtggcacaacttccggactttgtgtgactatagtaagaggattgcagtggctcttgaaattggggctgacctcccatctaatcatgtcattgatcgctggcttggggagcccatcaaagcagccattctccccactagcattttcctgaccaataagaagggatttcctgttctttctaagatgcaccagaggctcatcttccggctcctcaagttggaggtgcagttcatcatcacaggcaccaaccaccactcagagaaggagttctgctcctacctccaatacctggaatacttaagccagaaccgtcctccacctaatgcctatgaactctttgccaagggctatgaagactatctgcagtccccgcttcagccactgatggacaatctggaatctcagacatatgaagtgtttgaaaaggaccccatcaaatactctcagtaccagcaggccatctataaatgtctgctagaccgagtaccagaagaggagaaggataccaatgtccaggtactgatggtgctgggagcaggacggggacccctggtgaacgcttccctgcgggcagccaagcaggccgaccggcggataaagctgtatgctgtggagaaaaacccaaatgccgtggtgacgctagagaactggcagtttgaagaatggggaagccaagtgaccgtagtctcatcagacatgagggaatgggtggctccagagaaagcagacatcattgtcagtgagcttctgggctcatttgctgacaatgaattgtcgcctgagtgcctggatggagcccagcacttcctaaaagatgatggtgtgagcatccccggggagtacacttcctttctggctcccatctcttcctccaagctgtacaatgaggtccgagcctgtagggagaaggaccgtgaccctgaggcccagtttgagatgccttatgtggtacggctgcacaacttccaccagctctctgcaccccagccctgtttcaccttcagccatcccaacagagatcctatgattgacaacaaccgctattgcaccttggaatttcctgtggaggtgaacacagtactacatggctttgccggctactttgagactgtgctttatcaggacatcactctgagtatccgtccagagactcactctcctgggatgttctcatggtttcccatcctcttccctattaagcagcccataacggtacgtgaaggccaaaccatctgtgtgcgtttctggcgatgcagcaattccaagaaggtgtggtatgagtgggctgtgacagcaccagtctgttctgctattcataaccccacaggccgctcatataccattggcctctgagatcccaagcacgcagcaatgcagctcaaaacgcttagcctagccacacccccacgggaaacagcagtgattaacctttagcaataaacgaaagtttaactaagctatactaaccccagggttggtcaatttcgtgccagccacaccctggtactgcatgcacgcaatgctagctgcccctttcccgtcctgggcaccccgagtctcccccgaccccgggtcccaggtatgctcccacctccacctgccccactcaccacctctgctagttccagacacctccgagacgagg

SEQ ID NO: 325 - RNA, 7171 nt, synthetic construct
  misc_feature 1..7171: note = V73 mRNA
  source 1..7171: mol_type = other RNA
aggactcactatttgttttcgcgcccagttgcaaaaagtgtcgacatttgcttctgacacaactgtgttcactagcaacctcaaacagacaccgccaccatgcctgctgctaagagagtgaaactggatggatccaccggtccagccaccatgaaccatgaccaggaatttgaccccccaaaggtttacccacctgtgccagctgagaagaggaagcccatccgcgtgctgtctctctttgatgggattgctacagggctcctggtgctgaaggacctgggcatccaagtggaccgctacattgcctccgaggtgtgtgaggactccatcacggtgggcatggtgcggcaccagggaaagatcatgtacgtcggggacgtccgcagcgtcacacagaagcatatccaggagtggggcccattcgacctggtgattggaggcagtccctgcaatgacctctccattgtcaaccctgcccgcaagggactttatgagggtactggccgcctcttctttgagttctaccgcctcctgcatgatgcgcggcccaaggagggagatgatcgccccttcttctggctctttgagaatgtggtggccatgggcgttagtgacaagagggacatctcgcgatttcttgagtctaaccccgtgatgattgacgccaaagaagtgtctgctgcacacagggcccgttacttctggggtaaccttcctggcatgaacaggcctttggcatccactgtgaatgataagctggagctgcaagagtgtctggagcacggcagaatagccaagttcagcaaagtgaggaccattaccaccaggtcaaactctataaagcagggcaaagaccagcatttccccgtcttcatgaacgagaaggaggacatcctgtggtgcactgaaatggaaagggtgtttggcttccccgtccactacacagacgtctccaacatgagccgcttggcgaggcagagactgctgggccgatcgtggagcgtgccggtcatccgccacctcttcgctccgctgaaggaatattttgcttgtgtgtctagcggcaatagtaacgctaacagccgcgggccgagcttcagcagcggcctggtgccgttaagcttgcgcggcagccatatgggccctatggagatatacaagacagtgtctgcatggaagagacagccagtgcgggtactgagcctcttcagaaacatcgacaaggtactaaagagtttgggcttcttggaaagcggttctggttctgggggaggaacgctgaagtacgtggaagatgtcacaaatgtcgtgaggagagacgtggagaaatggggcccctttgacctggtgtacggctcgacgcagcccctaggcagctcttgtgatcgctgtcccggctggtacatgttccagttccaccggatcctgcagtatgcgctgcctcgccaggagagtcagcggcccttcttctggatattcatggacaatctgctgctgactgaggatgaccaagagacaactacccgcttccttcagacagaggctgtgaccctccaggatgtccgtggcagagactaccagaatgctatgcgggtgtggagcaacattccagggctgaagagcaagcatgcgcccctgaccccaaaggaagaagagtatctgcaagcccaagtcagaagcaggagcaagctggacgccccgaaagttgacctcctggtgaagaactgccttctcccgctgagagagtacttcaagtatttttctcaaaactcacttcctcttggagggccgagctctggcgcacccccaccaagtggagggtctcctgccgggtccccaacatctactgaagaaggcaccagcgaatccgcaacgcccgagtcaggccctggtacctccacagaaccatctgaaggtagtgcgcctggttccccagctggaagccctacttccaccgaagaaggcacgtcaaccgaaccaagtgaaggatctgcccctgggaccagcactgaaccatctgagccaaaaaagaagagaaaggtaatggacaagaagtacagcatcggcctggccatcggcaccaactctgtgggctgggccgtgatcaccgacgagtacaaggtgcccagcaagaaattcaaggtgctgggcaacaccgaccggcacagcatcaagaagaacctgatcggcgccctgctgttcgacagcggagaaacagccgaggccacccggctgaagagaaccgccagaagaagatacaccagacggaagaaccggatctgctatctgcaagagatcttcagcaacgagatggccaaggtggacgacagcttcttccacagactggaagagtccttcctggtggaagaggataagaagcacgagcggcaccccatcttcggcaacatcgtggacgaggtggcctaccacgagaagtaccccaccatctaccacctgagaaagaaactggtggacagcaccgacaaggccgacctgcggctgatctatctggccctggcccacatgatcaagttccggggccacttcctgatcgagggcgacctgaaccccgacaacagcgacgtggacaagctgttcatccagctggtgcagacctacaaccagctgttcgaggaaaaccccatcaacgccagcggcgtggacgccaaggccatcctgtctgccagactgagcaagagcagacggctggaaaatctgatcgcccagctgcccggcgagaagaagaatggcctgttcggcaacctgattgccctgagcctgggcctgacccccaacttcaagagcaacttcgacctggccgaggatgccaaactgcagctgagcaaggacacctacgacgacgacctggacaacctgctggcccagatcggcgaccagtacgccgacctgtttctggccgccaagaacctgtccgacgccatcctgctgagcgacatcctgagagtgaacaccgagatcaccaaggcccccctgagcgcctctatgatcaagagatacgacgagcaccaccaggacctgaccctgctgaaagctctcgtgcggcagcagctgcctgagaagtacaaagagattttcttcgaccagagcaagaacggctacgccggctacatcgatggcggagccagccaggaagagttctacaagttcatcaagcccatcctggaaaagatggacggcaccgaggaactgctcgtgaagctgaacagagaggacctgctgcggaagcagcggaccttcgacaacggcagcatcccccaccagatccacctgggagagctgcacgccattctgcggcggcaggaagatttttacccattcctgaaggacaaccgggaaaagatcgagaagatcctgaccttccgcatcccctactacgtgggccctctggccaggggaaacagcagattcgcctggatgaccagaaagagcgaggaaaccatcaccccctggaacttcgaggaagtggtggacaagggcgccagcgcccagagcttcatcgagcggatgaccaacttcgataagaacctgcccaacgagaaggtgctgcccaagcacagcctgctgtacgagtacttcaccgtgtacaacgagctgaccaaagtgaaatacgtgaccgagggaatgagaaagcccgccttcctgagcggcgagcagaaaaaagccatcgtggacctgctgttcaagaccaaccggaaagtgaccgtgaagcagctgaaagaggactacttcaagaaaatcgagtgcttcgactccgtggaaatctccggcgtggaagatcggttcaacgcctccctgggcacataccacgatctgctgaaaattatcaaggacaaggacttcctggacaatgaggaaaacgaggacattctggaagatatcgtgctgaccctgacactgtttgaggacagagagatgatcgaggaacggctgaaaacctatgcccacctgttcgacgacaaagtgatgaagcagctgaagcggcggagatacaccggctggggcaggctgagccggaagctgatcaacggcatccgggacaagcagtccggcaagacaatcctggatttcctgaagtccgacggcttcgccaacagaaacttcatgcagctgatccacgacgacagcctgacctttaaagaggacatccagaaagcccaggtgtccggccagggcgatagcctgcacgagcacattgccaatctggccggcagccccgccattaagaagggcatcctgcagacagtgaaggtggtggacgagctcgtgaaagtgatgggccggcacaagcccgagaacatcgtgatcgaaatggccagagagaaccagaccacccagaagggacagaagaacagccgcgagagaatgaagcggatcgaagagggcatcaaagagctgggcagccagatcctgaaagaacaccccgtggaaaacacccagctgcagaacgagaagctgtacctgtactacctgcagaatgggcgggatatgtacgtggaccaggaactggacatcaaccggctgtccgactacgatgtggacgctatcgtgcctcagagctttctgaaggacgactccatcgataacaaagtgctgactcggagcgacaagaaccggggcaagagcgacaacgtgccctccgaagaggtcgtgaagaagatgaagaactactggcgccagctgctgaatgccaagctgattacccagaggaagttcgacaatctgaccaaggccgagagaggcggcctgagcgaactggataaggccggcttcatcaagagacagctggtggaaacccggcagatcacaaagcacgtggcacagatcctggactcccggatgaacactaagtacgacgagaacgacaaactgatccgggaagtgaaagtgatcaccctgaagtccaagctggtgtccgatttccggaaggatttccagttttacaaagtgcgcgagatcaacaactaccaccacgcccacgacgcctacctgaacgccgtcgtgggaaccgccctgatcaaaaagtaccctaagctggaaagcgagttcgtgtacggcgactacaaggtgtacgacgtgcggaagatgatcgccaagagcgagcaggaaatcggcaaggctaccgccaagtacttcttctacagcaacatcatgaactttttcaagaccgagattaccctggccaacggcgagatccggaagcggcctctgatcgagacaaacggcgaaacaggcgagatcgtgtgggataagggccgggactttgccaccgtgcggaaagtgctgtctatgccccaagtgaatatcgtgaaaaagaccgaggtgcagacaggcggcttcagcaaagagtctatcctgcccaagaggaacagcgacaagctgatcgccagaaagaaggactgggaccctaagaagtacggcggcttcgacagccccaccgtggcctattctgtgctggtggtggccaaagtggaaaagggcaagtccaagaaactgaagagtgtgaaagagctgctggggatcaccatcatggaaagaagcagcttcgagaagaatcccatcgactttctggaagccaagggctacaaagaagtgaaaaaggacctgatcatcaagctgcctaagtactccctgttcgagctggaaaacggccggaagagaatgctggcctctgccggcgaactgcagaagggaaacgaactggccctgccctccaaatatgtgaacttcctgtacctggccagccactatgagaagctgaagggctcccccgaggataatgagcagaaacagctgtttgtggaacagcacaaacactacctggacgagatcatcgagcagatcagcgagttctccaagagagtgatcctggccgacgctaatctggacaaggtgctgagcgcctacaacaagcacagagacaagcctatcagagagcaggccgagaatatcatccacctgtttaccctgaccaatctgggagcccctgccgccttcaagtactttgacaccaccatcgaccggaagaggtacaccagcaccaaagaggtgctggacgccaccctgatccaccagagcatcaccggcctgtacgagacacggatcgacctgtctcagctgggaggcgacgcctatccctatgacgtgcccgattatgccagcctgggcagcggctcccccaagaaaaaacgcaaggtggaagatcctaagaaaaagcggaaagtggacggcagcggcagcgagacccccggtaccagcgagagcgccacccccgagagccggacactcggaaagaaaaccaagcggacagctgacagttcttcttcagaggatgaggaggagtatgttgtggagaaggtgctagacaggcgcgtggttaagggacaagtggaatatctactgaagtggaaaggcttttctgaggagcacaatacttgggaacctgagaaaaacttggattgccctgagctaatttctgaatttatgaaaaagtataagaagatgaaggagggtgaaaataataaacccagggagaagtcagaaagtaacaagaggaaatccaatttctcaaacagtgccgatgacatcaaatctaaaaaaaagagagagcagagcaatgatatcgctcggggctttgagagaggactggaaccagaaaagatcattggggcaacagattcctgtggtgatttaatgttcctaatgaaatggaaagacacagatgaagctgacctggttcttgcaaaagaagctaatgtgaaatgtccacaaattgtgatagcattttatgaagagagactgacatggcatgcatatcctgaggatgcggaaaacaaagagaaagaaacagcaaagagctgagatcccaagcacgcagcaatgcagctcaaaacgcttagcctagccacacccccacgggaaacagcagtgattaacctttagcaataaacgaaagtttaactaagctatactaaccccagggttggtcaatttcgtgccagccacaccctggtactgcatgcacgcaatgctagctgcccctttcccgtcctgggcaccccgagtctcccccgaccccgggtcccaggtatgctcccacctccacctgccccactcaccacctctgctagttccagacacctccgagacgagg

SEQ ID NO: 326 - RNA, 7642 nt, synthetic construct
  misc_feature 1..7642: note = V74 mRNA
  source 1..7642: mol_type = other RNA
aggactcactatttgttttcgcgcccagttgcaaaaagtgtcgacatttgcttctgacacaactgtgttcactagcaacctcaaacagacaccgccaccatgcctgctgctaagagagtgaaactggatggatccaccggtccagccaccatgaaccatgaccaggaatttgaccccccaaaggtttacccacctgtgccagctgagaagaggaagcccatccgcgtgctgtctctctttgatgggattgctacagggctcctggtgctgaaggacctgggcatccaagtggaccgctacattgcctccgaggtgtgtgaggactccatcacggtgggcatggtgcggcaccagggaaagatcatgtacgtcggggacgtccgcagcgtcacacagaagcatatccaggagtggggcccattcgacctggtgattggaggcagtccctgcaatgacctctccattgtcaaccctgcccgcaagggactttatgagggtactggccgcctcttctttgagttctaccgcctcctgcatgatgcgcggcccaaggagggagatgatcgccccttcttctggctctttgagaatgtggtggccatgggcgttagtgacaagagggacatctcgcgatttcttgagtctaaccccgtgatgattgacgccaaagaagtgtctgctgcacacagggcccgttacttctggggtaaccttcctggcatgaacaggcctttggcatccactgtgaatgataagctggagctgcaagagtgtctggagcacggcagaatagccaagttcagcaaagtgaggaccattaccaccaggtcaaactctataaagcagggcaaagaccagcatttccccgtcttcatgaacgagaaggaggacatcctgtggtgcactgaaatggaaagggtgtttggcttccccgtccactacacagacgtctccaacatgagccgcttggcgaggcagagactgctgggccgatcgtggagcgtgccggtcatccgccacctcttcgctccgctgaaggaatattttgcttgtgtgtctagcggcaatagtaacgctaacagccgcgggccgagcttcagcagcggcctggtgccgttaagcttgcgcggcagccatatgggccctatggagatatacaagacagtgtctgcatggaagagacagccagtgcgggtactgagcctcttcagaaacatcgacaaggtactaaagagtttgggcttcttggaaagcggttctggttctgggggaggaacgctgaagtacgtggaagatgtcacaaatgtcgtgaggagagacgtggagaaatggggcccctttgacctggtgtacggctcgacgcagcccctaggcagctcttgtgatcgctgtcccggctggtacatgttccagttccaccggatcctgcagtatgcgctgcctcgccaggagagtcagcggcccttcttctggatattcatggacaatctgctgctgactgaggatgaccaagagacaactacccgcttccttcagacagaggctgtgaccctccaggatgtccgtggcagagactaccagaatgctatgcgggtgtggagcaacattccagggctgaagagcaagcatgcgcccctgaccccaaaggaagaagagtatctgcaagcccaagtcagaagcaggagcaagctggacgccccgaaagttgacctcctggtgaagaactgccttctcccgctgagagagtacttcaagtatttttctcaaaactcacttcctcttggagggccgagctctggcgcacccccaccaagtggagggtctcctgccgggtccccaacatctactgaagaaggcaccagcgaatccgcaacgcccgagtcaggccctggtacctccacagaaccatctgaaggtagtgcgcctggttccccagctggaagccctacttccaccgaagaaggcacgtcaaccgaaccaagtgaaggatctgcccctgggaccagcactgaaccatctgagccaaaaaagaagagaaaggtaatggacaagaagtacagcatcggcctggccatcggcaccaactctgtgggctgggccgtgatcaccgacgagtacaaggtgcccagcaagaaattcaaggtgctgggcaacaccgaccggcacagcatcaagaagaacctgatcggcgccctgctgttcgacagcggagaaacagccgaggccacccggctgaagagaaccgccagaagaagatacaccagacggaagaaccggatctgctatctgcaagagatcttcagcaacgagatggccaaggtggacgacagcttcttccacagactggaagagtccttcctggtggaagaggataagaagcacgagcggcaccccatcttcggcaacatcgtggacgaggtggcctaccacgagaagtaccccaccatctaccacctgagaaagaaactggtggacagcaccgacaaggccgacctgcggctgatctatctggccctggcccacatgatcaagttccggggccacttcctgatcgagggcgacctgaaccccgacaacagcgacgtggacaagctgttcatccagctggtgcagacctacaaccagctgttcgaggaaaaccccatcaacgccagcggcgtggacgccaaggccatcctgtctgccagactgagcaagagcagacggctggaaaatctgatcgcccagctgcccggcgagaagaagaatggcctgttcggcaacctgattgccctgagcctgggcctgacccccaacttcaagagcaacttcgacctggccgaggatgccaaactgcagctgagcaaggacacctacgacgacgacctggacaacctgctggcccagatcggcgaccagtacgccgacctgtttctggccgccaagaacctgtccgacgccatcctgctgagcgacatcctgagagtgaacaccgagatcaccaaggcccccctgagcgcctctatgatcaagagatacgacgagcaccaccaggacctgaccctgctgaaagctctcgtgcggcagcagctgcctgagaagtacaaagagattttcttcgaccagagcaagaacggctacgccggctacatcgatggcggagccagccaggaagagttctacaagttcatcaagcccatcctggaaaagatggacggcaccgaggaactgctcgtgaagctgaacagagaggacctgctgcggaagcagcggaccttcgacaacggcagcatcccccaccagatccacctgggagagctgcacgccattctgcggcggcaggaagatttttacccattcctgaaggacaaccgggaaaagatcgagaagatcctgaccttccgcatcccctactacgtgggccctctggccaggggaaacagcagattcgcctggatgaccagaaagagcgaggaaaccatcaccccctggaacttcgaggaagtggtggacaagggcgccagcgcccagagcttcatcgagcggatgaccaacttcgataagaacctgcccaacgagaaggtgctgcccaagcacagcctgctgtacgagtacttcaccgtgtacaacgagctgaccaaagtgaaatacgtgaccgagggaatgagaaagcccgccttcctgagcggcgagcagaaaaaagccatcgtggacctgctgttcaagaccaaccggaaagtgaccgtgaagcagctgaaagaggactacttcaagaaaatcgagtgcttcgactccgtggaaatctccggcgtggaagatcggttcaacgcctccctgggcacataccacgatctgctgaaaattatcaaggacaaggacttcctggacaatgaggaaaacgaggacattctggaagatatcgtgctgaccctgacactgtttgaggacagagagatgatcgaggaacggctgaaaacctatgcccacctgttcgacgacaaagtgatgaagcagctgaagcggcggagatacaccggctggggcaggctgagccggaagctgatcaacggcatccgggacaagcagtccggcaagacaatcctggatttcctgaagtccgacggcttcgccaacagaaacttcatgcagctgatccacgacgacagcctgacctttaaagaggacatccagaaagcccaggtgtccggccagggcgatagcctgcacgagcacattgccaatctggccggcagccccgccattaagaagggcatcctgcagacagtgaaggtggtggacgagctcgtgaaagtgatgggccggcacaagcccgagaacatcgtgatcgaaatggccagagagaaccagaccacccagaagggacagaagaacagccgcgagagaatgaagcggatcgaagagggcatcaaagagctgggcagccagatcctgaaagaacaccccgtggaaaacacccagctgcagaacgagaagctgtacctgtactacctgcagaatgggcgggatatgtacgtggaccaggaactggacatcaaccggctgtccgactacgatgtggacgctatcgtgcctcagagctttctgaaggacgactccatcgataacaaagtgctgactcggagcgacaagaaccggggcaagagcgacaacgtgccctccgaagaggtcgtgaagaagatgaagaactactggcgccagctgctgaatgccaagctgattacccagaggaagttcgacaatctgaccaaggccgagagaggcggcctgagcgaactggataaggccggcttcatcaagagacagctggtggaaacccggcagatcacaaagcacgtggcacagatcctggactcccggatgaacactaagtacgacgagaacgacaaactgatccgggaagtgaaagtgatcaccctgaagtccaagctggtgtccgatttccggaaggatttccagttttacaaagtgcgcgagatcaacaactaccaccacgcccacgacgcctacctgaacgccgtcgtgggaaccgccctgatcaaaaagtaccctaagctggaaagcgagttcgtgtacggcgactacaaggtgtacgacgtgcggaagatgatcgccaagagcgagcaggaaatcggcaaggctaccgccaagtacttcttctacagcaacatcatgaactttttcaagaccgagattaccctggccaacggcgagatccggaagcggcctctgatcgagacaaacggcgaaacaggcgagatcgtgtgggataagggccgggactttgccaccgtgcggaaagtgctgtctatgccccaagtgaatatcgtgaaaaagaccgaggtgcagacaggcggcttcagcaaagagtctatcctgcccaagaggaacagcgacaagctgatcgccagaaagaaggactgggaccctaagaagtacggcggcttcgacagccccaccgtggcctattctgtgctggtggtggccaaagtggaaaagggcaagtccaagaaactgaagagtgtgaaagagctgctggggatcaccatcatggaaagaagcagcttcgagaagaatcccatcgactttctggaagccaagggctacaaagaagtgaaaaaggacctgatcatcaagctgcctaagtactccctgttcgagctggaaaacggccggaagagaatgctggcctctgccggcgaactgcagaagggaaacgaactggccctgccctccaaatatgtgaacttcctgtacctggccagccactatgagaagctgaagggctcccccgaggataatgagcagaaacagctgtttgtggaacagcacaaacactacctggacgagatcatcgagcagatcagcgagttctccaagagagtgatcctggccgacgctaatctggacaaggtgctgagcgcctacaacaagcacagagacaagcctatcagagagcaggccgagaatatcatccacctgtttaccctgaccaatctgggagcccctgccgccttcaagtactttgacaccaccatcgaccggaagaggtacaccagcaccaaagaggtgctggacgccaccctgatccaccagagcatcaccggcctgtacgagacacggatcgacctgtctcagctgggaggcgacgcctatccctatgacgtgcccgattatgccagcctgggcagcggctcccccaagaaaaaacgcaaggtggaagatcctaagaaaaagcggaaagtggacggcagcggcagcgagacccccggtaccagcgagagcgccacccccgagagccggacactcgagcctccacctaatgcctatgaactctttgccaagggctatgaagactatctgcagtccccgcttcagccactgatggacaatctggaatctcagacatatgaagtgtttgaaaaggaccccatcaaatactctcagtaccagcaggccatctataaatgtctgctagaccgagtaccagaagaggagaaggataccaatgtccaggtactgatggtgctgggagcaggacggggacccctggtgaacgcttccctgcgggcagccaagcaggccgaccggcggataaagctgtatgctgtggagaaaaacccaaatgccgtggtgacgctagagaactggcagtttgaagaatggggaagccaagtgaccgtagtctcatcagacatgagggaatgggtggctccagagaaagcagacatcattgtcagtgagcttctgggctcatttgctgacaatgaattgtcgcctgagtgcctggatggagcccagcacttcctaaaagatgatggtgtgagcatccccggggagtacacttcctttctggctcccatctcttcctccaagctgtacaatgaggtccgagcctgtagggagaaggaccgtgaccctgaggcccagtttgagatgccttatgtggtacggctgcacaacttccaccagctctctgcaccccagccctgtttcaccttcagccatcccaacagagatcctatgattgacaacaaccgctattgcaccttggaatttcctgtggaggtgaacacagtactacatggctttgccggctactttgagactgtgctttatcaggacatcactctgagtatccgtccagagactcactctcctgggatgttctcatggtttcccatcctcttccctattaagcagcccataacggtacgtgaaggccaaaccatctgtgtgcgtttctggcgatgcagcaattccaagaaggtgtggtatgagtgggctgtgacagcaccagtctgttctgctattcataaccccacaggccgctcatataccattggcctctgagatcccaagcacgcagcaatgcagctcaaaacgcttagcctagccacacccccacgggaaacagcagtgattaacctttagcaataaacgaaagtttaactaagctatactaaccccagggttggtcaatttcgtgccagccacaccctggtactgcatgcacgcaatgctagctgcccctttcccgtcctgggcaccccgagtctcccccgaccccgggtcccaggtatgctcccacctccacctgccccactcaccacctctgctagttccagacacctccgagacgagg

SEQ ID NO: 327 - RNA, 9307 nt, synthetic construct
  misc_feature 1..9307: note = V75 mRNA
  source 1..9307: mol_type = other RNA
aggactcactatttgttttcgcgcccagttgcaaaaagtgtcgacatttgcttctgacacaactgtgttcactagcaacctcaaacagacaccgccaccatgaaccatgaccaggaatttgaccccccaaaggtttacccacctgtgccagctgagaagaggaagcccatccgcgtgctgtctctctttgatgggattgctacagggctcctggtgctgaaggacctgggcatccaagtggaccgctacattgcctccgaggtgtgtgaggactccatcacggtgggcatggtgcggcaccagggaaagatcatgtacgtcggggacgtccgcagcgtcacacagaagcatatccaggagtggggcccattcgacctggtgattggaggcagtccctgcaatgacctctccattgtcaaccctgcccgcaagggactttatgagggtactggccgcctcttctttgagttctaccgcctcctgcatgatgcgcggcccaaggagggagatgatcgccccttcttctggctctttgagaatgtggtggccatgggcgttagtgacaagagggacatctcgcgatttcttgagtctaaccccgtgatgattgacgccaaagaagtgtctgctgcacacagggcccgttacttctggggtaaccttcctggcatgaacaggcctttggcatccactgtgaatgataagctggagctgcaagagtgtctggagcacggcagaatagccaagttcagcaaagtgaggaccattaccaccaggtcaaactctataaagcagggcaaagaccagcatttccccgtcttcatgaacgagaaggaggacatcctgtggtgcactgaaatggaaagggtgtttggcttccccgtccactacacagacgtctccaacatgagccgcttggcgaggcagagactgctgggccgatcgtggagcgtgccggtcatccgccacctcttcgctccgctgaaggaatattttgcttgtgtgtctagcggcaatagtaacgctaacagccgcgggccgagcttcagcagcggcctggtgccgttaagcttgcgcggcagccatatgggccctatggagatatacaagacagtgtctgcatggaagagacagccagtgcgggtactgagcctcttcagaaacatcgacaaggtactaaagagtttgggcttcttggaaagcggttctggttctgggggaggaacgctgaagtacgtggaagatgtcacaaatgtcgtgaggagagacgtggagaaatggggcccctttgacctggtgtacggctcgacgcagcccctaggcagctcttgtgatcgctgtcccggctggtacatgttccagttccaccggatcctgcagtatgcgctgcctcgccaggagagtcagcggcccttcttctggatattcatggacaatctgctgctgactgaggatgaccaagagacaactacccgcttccttcagacagaggctgtgaccctccaggatgtccgtggcagagactaccagaatgctatgcgggtgtggagcaacattccagggctgaagagcaagcatgcgcccctgaccccaaaggaagaagagtatctgcaagcccaagtcagaagcaggagcaagctggacgccccgaaagttgacctcctggtgaagaactgccttctcccgctgagagagtacttcaagtatttttctcaaaactcacttcctcttggagggccgagctctggcgcacccccaccaagtggagggtctcctgccgggtccccaacatctactgaagaaggcaccagcgaatccgcaacgcccgagtcaggccctggtacctccacagaaccatctgaaggtagtgcgcctggttccccagctggaagccctacttccaccgaagaaggcacgtcaaccgaaccaagtgaaggatctgcccctgggaccagcactgaaccatctgagccaaaaaagaagagaaaggtaatggacaagaagtacagcatcggcctggccatcggcaccaactctgtgggctgggccgtgatcaccgacgagtacaaggtgcccagcaagaaattcaaggtgctgggcaacaccgaccggcacagcatcaagaagaacctgatcggcgccctgctgttcgacagcggagaaacagccgaggccacccggctgaagagaaccgccagaagaagatacaccagacggaagaaccggatctgctatctgcaagagatcttcagcaacgagatggccaaggtggacgacagcttcttccacagactggaagagtccttcctggtggaagaggataagaagcacgagcggcaccccatcttcggcaacatcgtggacgaggtggcctaccacgagaagtaccccaccatctaccacctgagaaagaaactggtggacagcaccgacaaggccgacctgcggctgatctatctggccctggcccacatgatcaagttccggggccacttcctgatcgagggcgacctgaaccccgacaacagcgacgtggacaagctgttcatccagctggtgcagacctacaaccagctgttcgaggaaaaccccatcaacgccagcggcgtggacgccaaggccatcctgtctgccagactgagcaagagcagacggctggaaaatctgatcgcccagctgcccggcgagaagaagaatggcctgttcggcaacctgattgccctgagcctgggcctgacccccaacttcaagagcaacttcgacctggccgaggatgccaaactgcagctgagcaaggacacctacgacgacgacctggacaacctgctggcccagatcggcgaccagtacgccgacctgtttctggccgccaagaacctgtccgacgccatcctgctgagcgacatcctgagagtgaacaccgagatcaccaaggcccccctgagcgcctctatgatcaagagatacgacgagcaccaccaggacctgaccctgctgaaagctctcgtgcggcagcagctgcctgagaagtacaaagagattttcttcgaccagagcaagaacggctacgccggctacatcgatggcggagccagccaggaagagttctacaagttcatcaagcccatcctggaaaagatggacggcaccgaggaactgctcgtgaagctgaacagagaggacctgctgcggaagcagcggaccttcgacaacggcagcatcccccaccagatccacctgggagagctgcacgccattctgcggcggcaggaagatttttacccattcctgaaggacaaccgggaaaagatcgagaagatcctgaccttccgcatcccctactacgtgggccctctggccaggggaaacagcagattcgcctggatgaccagaaagagcgaggaaaccatcaccccctggaacttcgaggaagtggtggacaagggcgccagcgcccagagcttcatcgagcggatgaccaacttcgataagaacctgcccaacgagaaggtgctgcccaagcacagcctgctgtacgagtacttcaccgtgtacaacgagctgaccaaagtgaaatacgtgaccgagggaatgagaaagcccgccttcctgagcggcgagcagaaaaaagccatcgtggacctgctgttcaagaccaaccggaaagtgaccgtgaagcagctgaaagaggactacttcaagaaaatcgagtgcttcgactccgtggaaatctccggcgtggaagatcggttcaacgcctccctgggcacataccacgatctgctgaaaattatcaaggacaaggacttcctggacaatgaggaaaacgaggacattctggaagatatcgtgctgaccctgacactgtttgaggacagagagatgatcgaggaacggctgaaaacctatgcccacctgttcgacgacaaagtgatgaagcagctgaagcggcggagatacaccggctggggcaggctgagccggaagctgatcaacggcatccgggacaagcagtccggcaagacaatcctggatttcctgaagtccgacggcttcgccaacagaaacttcatgcagctgatccacgacgacagcctgacctttaaagaggacatccagaaagcccaggtgtccggccagggcgatagcctgcacgagcacattgccaatctggccggcagccccgccattaagaagggcatcctgcagacagtgaaggtggtggacgagctcgtgaaagtgatgggccggcacaagcccgagaacatcgtgatcgaaatggccagagagaaccagaccacccagaagggacagaagaacagccgcgagagaatgaagcggatcgaagagggcatcaaagagctgggcagccagatcctgaaagaacaccccgtggaaaacacccagctgcagaacgagaagctgtacctgtactacctgcagaatgggcgggatatgtacgtggaccaggaactggacatcaaccggctgtccgactacgatgtggacgctatcgtgcctcagagctttctgaaggacgactccatcgataacaaagtgctgactcggagcgacaagaaccggggcaagagcgacaacgtgccctccgaagaggtcgtgaagaagatgaagaactactggcgccagctgctgaatgccaagctgattacccagaggaagttcgacaatctgaccaaggccgagagaggcggcctgagcgaactggataaggccggcttcatcaagagacagctggtggaaacccggcagatcacaaagcacgtggcacagatcctggactcccggatgaacactaagtacgacgagaacgacaaactgatccgggaagtgaaagtgatcaccctgaagtccaagctggtgtccgatttccggaaggatttccagttttacaaagtgcgcgagatcaacaactaccaccacgcccacgacgcctacctgaacgccgtcgtgggaaccgccctgatcaaaaagtaccctaagctggaaagcgagttcgtgtacggcgactacaaggtgtacgacgtgcggaagatgatcgccaagagcgagcaggaaatcggcaaggctaccgccaagtacttcttctacagcaacatcatgaactttttcaagaccgagattaccctggccaacggcgagatccggaagcggcctctgatcgagacaaacggcgaaacaggcgagatcgtgtgggataagggccgggactttgccaccgtgcggaaagtgctgtctatgccccaagtgaatatcgtgaaaaagaccgaggtgcagacaggcggcttcagcaaagagtctatcctgcccaagaggaacagcgacaagctgatcgccagaaagaaggactgggaccctaagaagtacggcggcttcgacagccccaccgtggcctattctgtgctggtggtggccaaagtggaaaagggcaagtccaagaaactgaagagtgtgaaagagctgctggggatcaccatcatggaaagaagcagcttcgagaagaatcccatcgactttctggaagccaagggctacaaagaagtgaaaaaggacctgatcatcaagctgcctaagtactccctgttcgagctggaaaacggccggaagagaatgctggcctctgccggcgaactgcagaagggaaacgaactggccctgccctccaaatatgtgaacttcctgtacctggccagccactatgagaagctgaagggctcccccgaggataatgagcagaaacagctgtttgtggaacagcacaaacactacctggacgagatcatcgagcagatcagcgagttctccaagagagtgatcctggccgacgctaatctggacaaggtgctgagcgcctacaacaagcacagagacaagcctatcagagagcaggccgagaatatcatccacctgtttaccctgaccaatctgggagcccctgccgccttcaagtactttgacaccaccatcgaccggaagaggtacaccagcaccaaagaggtgctggacgccaccctgatccaccagagcatcaccggcctgtacgagacacggatcgacctgtctcagctgggaggcgacgcctatccctatgacgtgcccgattatgccagcctgggcagcggctcccccaagaaaaaacgcaaggtggaagatcctaagaaaaagcggaaagtggacggcagcggcagcgagacccccggtaccagcgagagcgccacccccgagagccggacactcttatctgggaagaaggcggcagccgcggcggcggcggctgcagcggcagcaaccgggacggaggctggccctgggacagcaggcggctccgagaacgggtctgaggtggccgcgcagcccgcgggcctgtcgggcccagccgaggtcgggccgggggcggtgggggagcgcacaccccgcaagaaagagcctccgcgggcctcgccccccgggggcctggcggaaccgccggggtccgcagggcctcaggccggccctactgtcgtgcctgggtctgcgacccccatggaaactggaatagcagagactccggaggggcgtcggaccagccggcgcaagcgggcgaaggtagagtacagagagatggatgaaagcttggccaacctctcagaagatgagtattattcagaagaagagagaaatgccaaagcagagaaggaaaagaagcttcccccaccaccccctcaagccccacctgaggaagaaaatgaaagtgagcctgaagaaccatcggggcaagcaggaggacttcaagacgacagttctggagggtatggagacggccaagcatcaggtgtggagggcgcagctttccagagccgacttcctcatgaccggatgacttctcaagaagcagcctgttttccagatattatcagtggaccacaacagacccagaaggtttttcttttcattagaaaccgcacactgcagttgtggttggataatccaaagattcagctgacatttgaggctactctccaacaattagaagcaccttataacagtgatactgtgcttgtccaccgagttcacagttatttagagcgtcatggtcttatcaacttcggcatctataagaggataaaacccctaccaactaaaaagacaggaaaggtaattattataggctctggggtctcaggcttggcagcagctcgacagttacaaagttttggaatggatgtcacacttttggaagccagggatcgtgtgggtggacgagttgccacatttcgcaaaggaaactatgtagctgatcttggagccatggtggtaacaggtcttggagggaatcctatggctgtggtcagcaaacaagtaaatatggaactggccaagatcaagcaaaaatgcccactttatgaagccaacggacaagctgacactgtcaaggttcctaaagagaaagatgaaatggtagagcaagagtttaaccggttgctagaagctacatcttaccttagtcatcaactagacttcaatgtcctcaataataagcctgtgtcccttggccaggcattggaagttgtcattcagttacaagagaagcatgtcaaagatgagcagattgaacattggaagaagatagtgaaaactcaggaagaattgaaagaacttcttaataagatggtaaatttgaaagagaaaattaaagaactccatcagcaatacaaagaagcatctgaagtaaagccacccagagatattactgccgagttcttagtgaaaagcaaacacagggatctgaccgccctatgcaaggaatatgatgaattagctgaaacacaaggaaagctagaagaaaaacttcaggagttggaagcgaatcccccaagtgatgtatatctctcatcaagagacagacaaatacttgattggcattttgcaaatcttgaatttgctaatgccacacctctctcaactctctcccttaagcactgggatcaggatgatgactttgagttcactggcagccacctgacagtaaggaatggctactcgtgtgtgcctgtggctttagcagaaggcctagacattaaactgaatacagcagtgcgacaggttcgctacacggcttcaggatgtgaagtgatagctgtgaatacccgctccacgagtcaaacctttatttataaatgcgacgcagttctctgtacccttcccctgggtgtgctgaagcagcagccaccagccgttcagtttgtgccacctctccctgagtggaaaacatctgcagtccaaaggatgggatttggcaaccttaacaaggtggtgttgtgttttgatcgggtgttctgggatccaagtgtcaatttgttcgggcatgttggcagtacgactgccagcaggggtgagctcttcctcttctggaacctctataaagctccaatactgttggcactagtggcaggagaagctgctggtatcatggaaaacataagtgacgatgtgattgttggccgatgcctggccattctcaaagggatttttggtagcagtgcagtacctcagcccaaagaaactgtggtgtctcgttggcgtgctgatccctgggctcggggctcttattcctatgttgctgcaggatcatctggaaatgactatgatttaatggctcagccaatcactcctggcccctcgattccaggtgccccacagccgattccacgactcttctttgcgggagaacatacgatccgtaactacccagccacagtgcatggtgctctgctgagtgggctgcgagaagcgggaagaattgcagaccagtttttgggggccatgtatacgctgcctcgccaggccacaccaggtgttcctgcacagcagtccccaagcatggagggcagcggctaagatcccaagcacgcagcaatgcagctcaaaacgcttagcctagccacacccccacgggaaacagcagtgattaacctttagcaataaacgaaagtttaactaagctatactaaccccagggttggtcaatttcgtgccagccacaccctggtactgcatgcacgcaatgctagctgcccctttcccgtcctgggcaccccgagtctcccccgaccccgggtcccaggtatgctcccacctccacctgccccactcaccacctctgctagttccagacacctccgagacgaggaaaaaaaaaaaaaaaaaaaaaaaaaaaaaaaaaaaaaaaaaaaaaaaaaaaaaaaaaaaaaaaaaaaaaaaaaaaaaaaaaaaaaaaaaaaaaaaaaaaaaaaaaaaaaaaaaaaaaaaa

SEQ ID NO: 328 - protein, 2123 aa, synthetic construct
  REGION 1..2123: note = V1 fusion
  SITE 2123: note = misc_feature - Xaa =
MPAAKRVKLDGSNHDQEFDPPKVYPPVPAEKRKPIRVLSLFDGIATGLLVLKDLGIQVDRYIASEVCEDSITVGMVRHQGKIMYVGDVRSVTQKHIQEWGPFDLVIGGSPCNDLSIVNPARKGLYEGTGRLFFEFYRLLHDARPKEGDDRPFFWLFENVVAMGVSDKRDISRFLESNPVMIDAKEVSAAHRARYFWGNLPGMNRPLASTVNDKLELQECLEHGRIAKFSKVRTITTRSNSIKQGKDQHFPVFMNEKEDILWCTEMERVFGFPVHYTDVSNMSRLARQRLLGRSWSVPVIRHLFAPLKEYFACVSSGNSNANSRGPSFSSGLVPLSLRGSHMGPMEIYKTVSAWKRQPVRVLSLFRNIDKVLKSLGFLESGSGSGGGTLKYVEDVTNVVRRDVEKWGPFDLVYGSTQPLGSSCDRCPGWYMFQFHRILQYALPRQESQRPFFWIFMDNLLLTEDDQETTTRFLQTEAVTLQDVRGRDYQNAMRVWSNIPGLKSKHAPLTPKEEEYLQAQVRSRSKLDAPKVDLLVKNCLLPLREYFKYFSQNSLPLGGPSSGAPPPSGGSPAGSPTSTEEGTSESATPESGPGTSTEPSEGSAPGSPAGSPTSTEEGTSTEPSEGSAPGTSTEPSEPKKKRKVMDKKYSIGLAIGTNSVGWAVITDEYKVPSKKFKVLGNTDRHSIKKNLIGALLFDSGETAEATRLKRTARRRYTRRKNRICYLQEIFSNEMAKVDDSFFHRLEESFLVEEDKKHERHPIFGNIVDEVAYHEKYPTIYHLRKKLVDSTDKADLRLIYLALAHMIKFRGHFLIEGDLNPDNSDVDKLFIQLVQTYNQLFEENPINASGVDAKAILSARLSKSRRLENLIAQLPGEKKNGLFGNLIALSLGLTPNFKSNFDLAEDAKLQLSKDTYDDDLDNLLAQIGDQYADLFLAAKNLSDAILLSDILRVNTEITKAPLSASMIKRYDEHHQDLTLLKALVRQQLPEKYKEIFFDQSKNGYAGYIDGGASQEEFYKFIKPILEKMDGTEELLVKLNREDLLRKQRTFDNGSIPHQIHLGELHAILRRQEDFYPFLKDNREKIEKILTFRIPYYVGPLARGNSRFAWMTRKSEETITPWNFEEVVDKGASAQSFIERMTNFDKNLPNEKVLPKHSLLYEYFTVYNELTKVKYVTEGMRKPAFLSGEQKKAIVDLLFKTNRKVTVKQLKEDYFKKIECFDSVEISGVEDRFNASLGTYHDLLKIIKDKDFLDNEENEDILEDIVLTLTLFEDREMIEERLKTYAHLFDDKVMKQLKRRRYTGWGRLSRKLINGIRDKQSGKTILDFLKSDGFANRNFMQLIHDDSLTFKEDIQKAQVSGQGDSLHEHIANLAGSPAIKKGILQTVKVVDELVKVMGRHKPENIVIEMARENQTTQKGQKNSRERMKRIEEGIKELGSQILKEHPVENTQLQNEKLYLYYLQNGRDMYVDQELDINRLSDYDVDAIVPQSFLKDDSIDNKVLTRSDKNRGKSDNVPSEEVVKKMKNYWRQLLNAKLITQRKFDNLTKAERGGLSELDKAGFIKRQLVETRQITKHVAQILDSRMNTKYDENDKLIREVKVITLKSKLVSDFRKDFQFYKVREINNYHHAHDAYLNAVVGTALIKKYPKLESEFVYGDYKVYDVRKMIAKSEQEIGKATAKYFFYSNIMNFFKTEITLANGEIRKRPLIETNGETGEIVWDKGRDFATVRKVLSMPQVNIVKKTEVQTGGFSKESILPKRNSDKLIARKKDWDPKKYGGFDSPTVAYSVLVVAKVEKGKSKKLKSVKELLGITIMERSSFEKNPIDFLEAKGYKEVKKDLIIKLPKYSLFELENGRKRMLASAGELQKGNELALPSKYVNFLYLASHYEKLKGSPEDNEQKQLFVEQHKHYLDEIIEQISEFSKRVILADANLDKVLSAYNKHRDKPIREQAENIIHLFTLTNLGAPAAFKYFDTTIDRKRYTSTKEVLDATLIHQSITGLYETRIDLSQLGGDAYPYDVPDYASLGSGSPKKKRKVEDPKKKRKVDGSGSETPGTSESATPESRTLVTFKDVFVDFTREEWKLLDTAQQIVYRNVMLENYKNLVSLGYQLTKPDVILRLEKGEEPX

SEQ ID NO: 329 - DNA, 9837 bp, synthetic construct
  misc_feature 1..9837: note = V1 DNA
  source 1..9837: mol_type = other DNA
gagatacctacagcgtgagctatgagaaagcgccacgcttcccgaagggagaaaggcggacaggtatccggtaagcggcagggtcggaacaggagagcgcacgagggagcttccagggggaaacgcctggtatctttatagtcctgtcgggtttcgccacctctgacttgagcgtcgatttttgtgatgctcgtcaggggggcggagcctatggaaaaacgccagcaacgcggcctttttacggttcctggccttttgctggccttttgctcacatgttctttcctgcgttatcccctgattctgtggataaccgtattaccgcctttgagtgagctgataccgctcgccgcagccgaacgaccgagcgcagcgagtcagtgagcgaggaagcggaagagcgcccaatacgcaaaccgcctctccccgcgcgttggccgattcattaatgcagctggcacgacaggtttcccgactggaaagcgggcagtgagcgcaacgcaattaatgtgagttagctcactcattaggcaccccaggctttacactttatgcttccggctcgtatgttgtgtggaattgtgagcggataacaatttcacacaggaaacagctatgaccatgattacgcctctagaaagctttaatacgactcactataaggactcactatttgttttcgcgcccagttgcaaaaagtgtcgacatttgcttctgacacaactgtgttcactagcaacctcaaacagacaccgccaccatgcctgctgctaagagagtgaaactggatggatccaaccatgaccaggaatttgaccccccaaaggtttacccacctgtgccagctgagaagaggaagcccatccgcgtgctgtctctctttgatgggattgctacagggctcctggtgctgaaggacctgggcatccaagtggaccgctacattgcctccgaggtgtgtgaggactccatcacggtgggcatggtgcggcaccagggaaagatcatgtacgtcggggacgtccgcagcgtcacacagaagcatatccaggagtggggcccattcgacctggtgattggaggcagtccctgcaatgacctctccattgtcaaccctgcccgcaagggactttatgagggtactggccgcctcttctttgagttctaccgcctcctgcatgatgcgcggcccaaggagggagatgatcgccccttcttctggctctttgagaatgtggtggccatgggcgttagtgacaagagggacatctcgcgatttcttgagtctaaccccgtgatgattgacgccaaagaagtgtctgctgcacacagggcccgttacttctggggtaaccttcctggcatgaacaggcctttggcatccactgtgaatgataagctggagctgcaagagtgtctggagcacggcagaatagccaagttcagcaaagtgaggaccattaccaccaggtcaaactctataaagcagggcaaagaccagcatttccccgtgttcatgaacgagaaggaggacatcctgtggtgcactgaaatggaaagggtgtttggcttccccgtccactacacagacgtctccaacatgagccgcttggcgaggcagagactgctgggccgatcgtggagcgtgccggtcatccgccacctcttcgctccgctgaaggaatattttgcttgtgtgtctagcggcaatagtaacgctaacagccgcgggccgagcttcagcagcggcctggtgccgttaagcttgcgcggcagccatatgggccctatggagatatacaagacagtgtctgcatggaagagacagccagtgcgggtactgagcctcttcagaaacatcgacaaggtactaaagagtttgggcttcttggaaagcggttctggttctgggggaggaacgctgaagtacgtggaagatgtcacaaatgtcgtgaggagagacgtggagaaatggggcccctttgacctggtgtacggctcgacgcagcccctaggcagctcttgtgatcgctgtcccggctggtacatgttccagttccaccggatcctgcagtatgcgctgcctcgccaggagagtcagcggcccttcttctggatattcatggacaatctgctgctgactgaggatgaccaagagacaactacccgcttccttcagacagaggctgtgaccctccaggatgtccgtggcagagactaccagaatgctatgcgggtgtggagcaacattccagggctgaagagcaagcatgcgcccctgaccccaaaggaagaagagtatctgcaagcccaagtcagaagcaggagcaagctggacgccccgaaagttgacctcctggtgaagaactgccttctcccgctgagagagtacttcaagtatttttctcaaaactcacttcctcttggagggccgagctctggcgcacccccaccaagtggagggtctcctgccgggtccccaacatctactgaagaaggcaccagcgaatccgcaacgcccgagtcaggccctggtacctccacagaaccatctgaaggtagtgcgcctggttccccagctggaagccctacttccaccgaagaaggcacgtcaaccgaaccaagtgaaggatctgcccctgggaccagcactgaaccatctgagccaaaaaagaagagaaaggtaatggacaagaagtacagcatcggcctggccatcggcaccaactctgtgggctgggccgtgatcaccgacgagtacaaggtgcccagcaagaaattcaaggtgctgggcaacaccgaccggcacagcatcaagaagaacctgatcggcgccctgctgttcgacagcggagaaacagccgaggccacccggctgaagagaaccgccagaagaagatacaccagacggaagaaccggatctgctatctgcaagagatcttcagcaacgagatggccaaggtggacgacagcttcttccacagactggaagagtccttcctggtggaagaggataagaagcacgagcggcaccccatcttcggcaacatcgtggacgaggtggcctaccacgagaagtaccccaccatctaccacctgagaaagaaactggtggacagcaccgacaaggccgacctgcggctgatctatctggccctggcccacatgatcaagttccggggccacttcctgatcgagggcgacctgaaccccgacaacagcgacgtggacaagctgttcatccagctggtgcagacctacaaccagctgttcgaggaaaaccccatcaacgccagcggcgtggacgccaaggccatcctgtctgccagactgagcaagagcagacggctggaaaatctgatcgcccagctgcccggcgagaagaagaatggcctgttcggcaacctgattgccctgagcctgggcctgacccccaacttcaagagcaacttcgacctggccgaggatgccaaactgcagctgagcaaggacacctacgacgacgacctggacaacctgctggcccagatcggcgaccagtacgccgacctgtttctggccgccaagaacctgtccgacgccatcctgctgagcgacatcctgagagtgaacaccgagatcaccaaggcccccctgagcgcctctatgatcaagagatacgacgagcaccaccaggacctgaccctgctgaaagctctcgtgcggcagcagctgcctgagaagtacaaagagattttcttcgaccagagcaagaacggctacgccggctacatcgatggcggagccagccaggaagagttctacaagttcatcaagcccatcctggaaaagatggacggcaccgaggaactgctcgtgaagctgaacagagaggacctgctgcggaagcagcggaccttcgacaacggcagcatcccccaccagatccacctgggagagctgcacgccattctgcggcggcaggaagatttttacccattcctgaaggacaaccgggaaaagatcgagaagatcctgaccttccgcatcccctactacgtgggccctctggccaggggaaacagcagattcgcctggatgaccagaaagagcgaggaaaccatcaccccctggaacttcgaggaagtggtggacaagggcgccagcgcccagagcttcatcgagcggatgaccaacttcgataagaacctgcccaacgagaaggtgctgcccaagcacagcctgctgtacgagtacttcaccgtgtacaacgagctgaccaaagtgaaatacgtgaccgagggaatgagaaagcccgccttcctgagcggcgagcagaaaaaagccatcgtggacctgctgttcaagaccaaccggaaagtgaccgtgaagcagctgaaagaggactacttcaagaaaatcgagtgcttcgactccgtggaaatctccggcgtggaagatcggttcaacgcctccctgggcacataccacgatctgctgaaaattatcaaggacaaggacttcctggacaatgaggaaaacgaggacattctggaagatatcgtgctgaccctgacactgtttgaggacagagagatgatcgaggaacggctgaaaacctatgcccacctgttcgacgacaaagtgatgaagcagctgaagcggcggagatacaccggctggggcaggctgagccggaagctgatcaacggcatccgggacaagcagtccggcaagacaatcctggatttcctgaagtccgacggcttcgccaacagaaacttcatgcagctgatccacgacgacagcctgacctttaaagaggacatccagaaagcccaggtgtccggccagggcgatagcctgcacgagcacattgccaatctggccggcagccccgccattaagaagggcatcctgcagacagtgaaggtggtggacgagctcgtgaaagtgatgggccggcacaagcccgagaacatcgtgatcgaaatggccagagagaaccagaccacccagaagggacagaagaacagccgcgagagaatgaagcggatcgaagagggcatcaaagagctgggcagccagatcctgaaagaacaccccgtggaaaacacccagctgcagaacgagaagctgtacctgtactacctgcagaatgggcgggatatgtacgtggaccaggaactggacatcaaccggctgtccgactacgatgtggacgctatcgtgcctcagagctttctgaaggacgactccatcgataacaaagtgctgactcggagcgacaagaaccggggcaagagcgacaacgtgccctccgaagaggtcgtgaagaagatgaagaactactggcgccagctgctgaatgccaagctgattacccagaggaagttcgacaatctgaccaaggccgagagaggcggcctgagcgaactggataaggccggcttcatcaagagacagctggtggaaacccggcagatcacaaagcacgtggcacagatcctggactcccggatgaacactaagtacgacgagaacgacaaactgatccgggaagtgaaagtgatcaccctgaagtccaagctggtgtccgatttccggaaggatttccagttttacaaagtgcgcgagatcaacaactaccaccacgcccacgacgcctacctgaacgccgtcgtgggaaccgccctgatcaaaaagtaccctaagctggaaagcgagttcgtgtacggcgactacaaggtgtacgacgtgcggaagatgatcgccaagagcgagcaggaaatcggcaaggctaccgccaagtacttcttctacagcaacatcatgaactttttcaagaccgagattaccctggccaacggcgagatccggaagcggcctctgatcgagacaaacggcgaaacaggcgagatcgtgtgggataagggccgggactttgccaccgtgcggaaagtgctgtctatgccccaagtgaatatcgtgaaaaagaccgaggtgcagacaggcggcttcagcaaagagtctatcctgcccaagaggaacagcgacaagctgatcgccagaaagaaggactgggaccctaagaagtacggcggcttcgacagccccaccgtggcctattctgtgctggtggtggccaaagtggaaaagggcaagtccaagaaactgaagagtgtgaaagagctgctggggatcaccatcatggaaagaagcagcttcgagaagaatcccatcgactttctggaagccaagggctacaaagaagtgaaaaaggacctgatcatcaagctgcctaagtactccctgttcgagctggaaaacggccggaagagaatgctggcctctgccggcgaactgcagaagggaaacgaactggccctgccctccaaatatgtgaacttcctgtacctggccagccactatgagaagctgaagggctcccccgaggataatgagcagaaacagctgtttgtggaacagcacaaacactacctggacgagatcatcgagcagatcagcgagttctccaagagagtgatcctggccgacgctaatctggacaaggtgctgagcgcctacaacaagcacagagacaagcctatcagagagcaggccgagaatatcatccacctgtttaccctgaccaatctgggagcccctgccgccttcaagtactttgacaccaccatcgaccggaagaggtacaccagcaccaaagaggtgctggacgccaccctgatccaccagagcatcaccggcctgtacgagacacggatcgacctgtctcagctgggaggcgacgcctatccctatgacgtgcccgattatgccagcctgggcagcggctcccccaagaaaaaacgcaaggtggaagatcctaagaaaaagcggaaagtggacggcagcggcagcgagacccccggtaccagcgagagcgccacccccgagagccggacactggtgaccttcaaggatgtatttgtggacttcaccagggaggagtggaagctgctggacactgctcagcagatcgtgtacagaaatgtgatgctggagaactataagaacctggtttccttgggttatcagcttactaagccagatgtgatcctccggttggagaagggagaagagccctgagatcccaagcacgcagcaatgcagctcaaaacgcttagcctagccacacccccacgggaaacagcagtgattaacctttagcaataaacgaaagtttaactaagctatactaaccccagggttggtcaatttcgtgccagccacaccctggtactgcatgcacgcaatgctagctgcccctttcccgtcctgggcaccccgagtctcccccgaccccgggtcccaggtatgctcccacctccacctgccccactcaccacctctgctagttccagacacctccgagacgaggaaaaaaaaaaaaaaaaaaaaaaaaaaaaaaaaaaaaaaaaaaaaaaaaaaaaaaaaaaaaaaaaaaaaaaaaaaaaaaaaaaaaaaaaaaaaaaaaaaaaaaaaaaaaaaaaaaaaaaaaaaaaaaaaaaaaaaaaaaaaaaaaaaaaaaaaaaaaaaaaaaaaaaaaaaaaaaaaaaaaaaaaaaaaaaaaaaaaaaaaaaaaaaaaaaaaaaaaaaaaaaaaaaaaaaaaaaaaaaaaaaaaaaaaaaaaaaaaaaaaaaaaaaaaaaaaaaaaaaaaaaaaaaaaaaaaaaaaaaaaaaaaaaaaaaaaaaaaaaaaaaaaaaaaaaaaaaaaaaaaaaaaaaaaaaaaaaaaaaaaaaaaaaaaaaaaaaaaaaaaaaaaaaaaaaaaaaccgtcttcaagctttctagaaattcactggccgtcgttttacaacgtcgtgactgggaaaaccctggcgttacccaacttaatcgccttgcagcacatccccctttcgccagctggcgtaatagcgaagaggcccgcaccgatcgcccttcccaacagttgcgcagcctgaatggcgaatggcgcctgatgcggtattttctccttacgcatctgtgcggtatttcacaccgcatatggtgcactctcagtacaatctgctctgatgccgcatagttaagccagccccgacacccgccaacacccgctgacgcgccctgacgggcttgtctgctcccggcatccgcttacagacaagctgtgaccgtctccgggagctgcatgtgtcagaggttttcaccgtcatcaccgaaacgcgcgagacgaaagggcctcgtgatacgcctatttttataggttaatgtcatgataataatggtttcttagacgtcaggtggcacttttcggggaaatgtgcgcggaacccctatttgtttatttttctaaatacattcaaatatgtatccgctcatgagacaataaccctgataaatgcttcaataatattgaaaaaggaagagtatgagtattcaacatttccgtgtcgcccttattcccttttttgcggcattttgccttcctgtttttgctcacccagaaacgctggtgaaagtaaaagatgctgaagatcagttgggtgcacgagtgggttacatcgaactggatctcaacagcggtaagatccttgagagttttcgccccgaagaacgttttccaatgatgagcacttttaaagttctgctatgtggcgcggtattatcccgtattgacgccgggcaagagcaactcggtcgccgcatacactattctcagaatgacttggttgagtactcaccagtcacagaaaagcatcttacggatggcatgacagtaagagaattatgcagtgctgccataaccatgagtgataacactgcggccaacttacttctgacaacgatcggaggaccgaaggagctaaccgcttttttgcacaacatgggggatcatgtaactcgccttgatcgttgggaaccggagctgaatgaagccataccaaacgacgagcgtgacaccacgatgcctgtagcaatggcaacaacgttgcgcaaactattaactggcgaactacttactctagcttcccggcaacaattaatagactggatggaggcggataaagttgcaggaccacttctgcgctcggcccttccggctggctggtttattgctgataaatctggagccggtgagcgtgggtctcgcggtatcattgcagcactggggccagatggtaagccctcccgtatcgtagttatctacacgacggggagtcaggcaactatggatgaacgaaatagacagatcgctgagataggtgcctcactgattaagcattggtaactgtcagaccaagtttactcatatatactttagattgatttaaaacttcatttttaatttaaaaggatctaggtgaagatcctttttgataatctcatgaccaaaatcccttaacgtgagttttcgttccactgagcgtcagaccccgtagaaaagatcaaaggatcttcttgagatcctttttttctgcgcgtaatctgctgcttgcaaacaaaaaaaccaccgctaccagcggtggtttgtttgccggatcaagagctaccaactctttttccgaaggtaactggcttcagcagagcgcagataccaaatactgttcttctagtgtagccgtagttaggccaccacttcaagaactctgtagcaccgcctacatacctcgctctgctaatcctgttaccagtggctgctgccagtggcgataagtcgtgtcttaccgggttggactcaagacgatagttaccggataaggcgcagcggtcgggctgaacggggggttcgtgcacacagcccagcttggagcgaacgacctacaccgaact

SEQ ID NO: 330 - DNA, 6369 bp, synthetic construct
  misc_feature 1..6369: note = V1 CDS
  source 1..6369: mol_type = other DNA
atgcctgctgctaagagagtgaaactggatggatccaaccatgaccaggaatttgaccccccaaaggtttacccacctgtgccagctgagaagaggaagcccatccgcgtgctgtctctctttgatgggattgctacagggctcctggtgctgaaggacctgggcatccaagtggaccgctacattgcctccgaggtgtgtgaggactccatcacggtgggcatggtgcggcaccagggaaagatcatgtacgtcggggacgtccgcagcgtcacacagaagcatatccaggagtggggcccattcgacctggtgattggaggcagtccctgcaatgacctctccattgtcaaccctgcccgcaagggactttatgagggtactggccgcctcttctttgagttctaccgcctcctgcatgatgcgcggcccaaggagggagatgatcgccccttcttctggctctttgagaatgtggtggccatgggcgttagtgacaagagggacatctcgcgatttcttgagtctaaccccgtgatgattgacgccaaagaagtgtctgctgcacacagggcccgttacttctggggtaaccttcctggcatgaacaggcctttggcatccactgtgaatgataagctggagctgcaagagtgtctggagcacggcagaatagccaagttcagcaaagtgaggaccattaccaccaggtcaaactctataaagcagggcaaagaccagcatttccccgtgttcatgaacgagaaggaggacatcctgtggtgcactgaaatggaaagggtgtttggcttccccgtccactacacagacgtctccaacatgagccgcttggcgaggcagagactgctgggccgatcgtggagcgtgccggtcatccgccacctcttcgctccgctgaaggaatattttgcttgtgtgtctagcggcaatagtaacgctaacagccgcgggccgagcttcagcagcggcctggtgccgttaagcttgcgcggcagccatatgggccctatggagatatacaagacagtgtctgcatggaagagacagccagtgcgggtactgagcctcttcagaaacatcgacaaggtactaaagagtttgggcttcttggaaagcggttctggttctgggggaggaacgctgaagtacgtggaagatgtcacaaatgtcgtgaggagagacgtggagaaatggggcccctttgacctggtgtacggctcgacgcagcccctaggcagctcttgtgatcgctgtcccggctggtacatgttccagttccaccggatcctgcagtatgcgctgcctcgccaggagagtcagcggcccttcttctggatattcatggacaatctgctgctgactgaggatgaccaagagacaactacccgcttccttcagacagaggctgtgaccctccaggatgtccgtggcagagactaccagaatgctatgcgggtgtggagcaacattccagggctgaagagcaagcatgcgcccctgaccccaaaggaagaagagtatctgcaagcccaagtcagaagcaggagcaagctggacgccccgaaagttgacctcctggtgaagaactgccttctcccgctgagagagtacttcaagtatttttctcaaaactcacttcctcttggagggccgagctctggcgcacccccaccaagtggagggtctcctgccgggtccccaacatctactgaagaaggcaccagcgaatccgcaacgcccgagtcaggccctggtacctccacagaaccatctgaaggtagtgcgcctggttccccagctggaagccctacttccaccgaagaaggcacgtcaaccgaaccaagtgaaggatctgcccctgggaccagcactgaaccatctgagccaaaaaagaagagaaaggtaatggacaagaagtacagcatcggcctggccatcggcaccaactctgtgggctgggccgtgatcaccgacgagtacaaggtgcccagcaagaaattcaaggtgctgggcaacaccgaccggcacagcatcaagaagaacctgatcggcgccctgctgttcgacagcggagaaacagccgaggccacccggctgaagagaaccgccagaagaagatacaccagacggaagaaccggatctgctatctgcaagagatcttcagcaacgagatggccaaggtggacgacagcttcttccacagactggaagagtccttcctggtggaagaggataagaagcacgagcggcaccccatcttcggcaacatcgtggacgaggtggcctaccacgagaagtaccccaccatctaccacctgagaaagaaactggtggacagcaccgacaaggccgacctgcggctgatctatctggccctggcccacatgatcaagttccggggccacttcctgatcgagggcgacctgaaccccgacaacagcgacgtggacaagctgttcatccagctggtgcagacctacaaccagctgttcgaggaaaaccccatcaacgccagcggcgtggacgccaaggccatcctgtctgccagactgagcaagagcagacggctggaaaatctgatcgcccagctgcccggcgagaagaagaatggcctgttcggcaacctgattgccctgagcctgggcctgacccccaacttcaagagcaacttcgacctggccgaggatgccaaactgcagctgagcaaggacacctacgacgacgacctggacaacctgctggcccagatcggcgaccagtacgccgacctgtttctggccgccaagaacctgtccgacgccatcctgctgagcgacatcctgagagtgaacaccgagatcaccaaggcccccctgagcgcctctatgatcaagagatacgacgagcaccaccaggacctgaccctgctgaaagctctcgtgcggcagcagctgcctgagaagtacaaagagattttcttcgaccagagcaagaacggctacgccggctacatcgatggcggagccagccaggaagagttctacaagttcatcaagcccatcctggaaaagatggacggcaccgaggaactgctcgtgaagctgaacagagaggacctgctgcggaagcagcggaccttcgacaacggcagcatcccccaccagatccacctgggagagctgcacgccattctgcggcggcaggaagatttttacccattcctgaaggacaaccgggaaaagatcgagaagatcctgaccttccgcatcccctactacgtgggccctctggccaggggaaacagcagattcgcctggatgaccagaaagagcgaggaaaccatcaccccctggaacttcgaggaagtggtggacaagggcgccagcgcccagagcttcatcgagcggatgaccaacttcgataagaacctgcccaacgagaaggtgctgcccaagcacagcctgctgtacgagtacttcaccgtgtacaacgagctgaccaaagtgaaatacgtgaccgagggaatgagaaagcccgccttcctgagcggcgagcagaaaaaagccatcgtggacctgctgttcaagaccaaccggaaagtgaccgtgaagcagctgaaagaggactacttcaagaaaatcgagtgcttcgactccgtggaaatctccggcgtggaagatcggttcaacgcctccctgggcacataccacgatctgctgaaaattatcaaggacaaggacttcctggacaatgaggaaaacgaggacattctggaagatatcgtgctgaccctgacactgtttgaggacagagagatgatcgaggaacggctgaaaacctatgcccacctgttcgacgacaaagtgatgaagcagctgaagcggcggagatacaccggctggggcaggctgagccggaagctgatcaacggcatccgggacaagcagtccggcaagacaatcctggatttcctgaagtccgacggcttcgccaacagaaacttcatgcagctgatccacgacgacagcctgacctttaaagaggacatccagaaagcccaggtgtccggccagggcgatagcctgcacgagcacattgccaatctggccggcagccccgccattaagaagggcatcctgcagacagtgaaggtggtggacgagctcgtgaaagtgatgggccggcacaagcccgagaacatcgtgatcgaaatggccagagagaaccagaccacccagaagggacagaagaacagccgcgagagaatgaagcggatcgaagagggcatcaaagagctgggcagccagatcctgaaagaacaccccgtggaaaacacccagctgcagaacgagaagctgtacctgtactacctgcagaatgggcgggatatgtacgtggaccaggaactggacatcaaccggctgtccgactacgatgtggacgctatcgtgcctcagagctttctgaaggacgactccatcgataacaaagtgctgactcggagcgacaagaaccggggcaagagcgacaacgtgccctccgaagaggtcgtgaagaagatgaagaactactggcgccagctgctgaatgccaagctgattacccagaggaagttcgacaatctgaccaaggccgagagaggcggcctgagcgaactggataaggccggcttcatcaagagacagctggtggaaacccggcagatcacaaagcacgtggcacagatcctggactcccggatgaacactaagtacgacgagaacgacaaactgatccgggaagtgaaagtgatcaccctgaagtccaagctggtgtccgatttccggaaggatttccagttttacaaagtgcgcgagatcaacaactaccaccacgcccacgacgcctacctgaacgccgtcgtgggaaccgccctgatcaaaaagtaccctaagctggaaagcgagttcgtgtacggcgactacaaggtgtacgacgtgcggaagatgatcgccaagagcgagcaggaaatcggcaaggctaccgccaagtacttcttctacagcaacatcatgaactttttcaagaccgagattaccctggccaacggcgagatccggaagcggcctctgatcgagacaaacggcgaaacaggcgagatcgtgtgggataagggccgggactttgccaccgtgcggaaagtgctgtctatgccccaagtgaatatcgtgaaaaagaccgaggtgcagacaggcggcttcagcaaagagtctatcctgcccaagaggaacagcgacaagctgatcgccagaaagaaggactgggaccctaagaagtacggcggcttcgacagccccaccgtggcctattctgtgctggtggtggccaaagtggaaaagggcaagtccaagaaactgaagagtgtgaaagagctgctggggatcaccatcatggaaagaagcagcttcgagaagaatcccatcgactttctggaagccaagggctacaaagaagtgaaaaaggacctgatcatcaagctgcctaagtactccctgttcgagctggaaaacggccggaagagaatgctggcctctgccggcgaactgcagaagggaaacgaactggccctgccctccaaatatgtgaacttcctgtacctggccagccactatgagaagctgaagggctcccccgaggataatgagcagaaacagctgtttgtggaacagcacaaacactacctggacgagatcatcgagcagatcagcgagttctccaagagagtgatcctggccgacgctaatctggacaaggtgctgagcgcctacaacaagcacagagacaagcctatcagagagcaggccgagaatatcatccacctgtttaccctgaccaatctgggagcccctgccgccttcaagtactttgacaccaccatcgaccggaagaggtacaccagcaccaaagaggtgctggacgccaccctgatccaccagagcatcaccggcctgtacgagacacggatcgacctgtctcagctgggaggcgacgcctatccctatgacgtgcccgattatgccagcctgggcagcggctcccccaagaaaaaacgcaaggtggaagatcctaagaaaaagcggaaagtggacggcagcggcagcgagacccccggtaccagcgagagcgccacccccgagagccggacactggtgaccttcaaggatgtatttgtggacttcaccagggaggagtggaagctgctggacactgctcagcagatcgtgtacagaaatgtgatgctggagaactataagaacctggtttccttgggttatcagcttactaagccagatgtgatcctccggttggagaagggagaagagccctga

SEQ ID NO: 331 - RNA, 6880 nt, synthetic construct
  misc_feature 1..6880: note = V1 mRNA
  source 1..6880: mol_type = other RNA
aggactcactatttgttttcgcgcccagttgcaaaaagtgtcgacatttgcttctgacacaactgtgttcactagcaacctcaaacagacaccgccaccatgcctgctgctaagagagtgaaactggatggatccaaccatgaccaggaatttgaccccccaaaggtttacccacctgtgccagctgagaagaggaagcccatccgcgtgctgtctctctttgatgggattgctacagggctcctggtgctgaaggacctgggcatccaagtggaccgctacattgcctccgaggtgtgtgaggactccatcacggtgggcatggtgcggcaccagggaaagatcatgtacgtcggggacgtccgcagcgtcacacagaagcatatccaggagtggggcccattcgacctggtgattggaggcagtccctgcaatgacctctccattgtcaaccctgcccgcaagggactttatgagggtactggccgcctcttctttgagttctaccgcctcctgcatgatgcgcggcccaaggagggagatgatcgccccttcttctggctctttgagaatgtggtggccatgggcgttagtgacaagagggacatctcgcgatttcttgagtctaaccccgtgatgattgacgccaaagaagtgtctgctgcacacagggcccgttacttctggggtaaccttcctggcatgaacaggcctttggcatccactgtgaatgataagctggagctgcaagagtgtctggagcacggcagaatagccaagttcagcaaagtgaggaccattaccaccaggtcaaactctataaagcagggcaaagaccagcatttccccgtgttcatgaacgagaaggaggacatcctgtggtgcactgaaatggaaagggtgtttggcttccccgtccactacacagacgtctccaacatgagccgcttggcgaggcagagactgctgggccgatcgtggagcgtgccggtcatccgccacctcttcgctccgctgaaggaatattttgcttgtgtgtctagcggcaatagtaacgctaacagccgcgggccgagcttcagcagcggcctggtgccgttaagcttgcgcggcagccatatgggccctatggagatatacaagacagtgtctgcatggaagagacagccagtgcgggtactgagcctcttcagaaacatcgacaaggtactaaagagtttgggcttcttggaaagcggttctggttctgggggaggaacgctgaagtacgtggaagatgtcacaaatgtcgtgaggagagacgtggagaaatggggcccctttgacctggtgtacggctcgacgcagcccctaggcagctcttgtgatcgctgtcccggctggtacatgttccagttccaccggatcctgcagtatgcgctgcctcgccaggagagtcagcggcccttcttctggatattcatggacaatctgctgctgactgaggatgaccaagagacaactacccgcttccttcagacagaggctgtgaccctccaggatgtccgtggcagagactaccagaatgctatgcgggtgtggagcaacattccagggctgaagagcaagcatgcgcccctgaccccaaaggaagaagagtatctgcaagcccaagtcagaagcaggagcaagctggacgccccgaaagttgacctcctggtgaagaactgccttctcccgctgagagagtacttcaagtatttttctcaaaactcacttcctcttggagggccgagctctggcgcacccccaccaagtggagggtctcctgccgggtccccaacatctactgaagaaggcaccagcgaatccgcaacgcccgagtcaggccctggtacctccacagaaccatctgaaggtagtgcgcctggttccccagctggaagccctacttccaccgaagaaggcacgtcaaccgaaccaagtgaaggatctgcccctgggaccagcactgaaccatctgagccaaaaaagaagagaaaggtaatggacaagaagtacagcatcggcctggccatcggcaccaactctgtgggctgggccgtgatcaccgacgagtacaaggtgcccagcaagaaattcaaggtgctgggcaacaccgaccggcacagcatcaagaagaacctgatcggcgccctgctgttcgacagcggagaaacagccgaggccacccggctgaagagaaccgccagaagaagatacaccagacggaagaaccggatctgctatctgcaagagatcttcagcaacgagatggccaaggtggacgacagcttcttccacagactggaagagtccttcctggtggaagaggataagaagcacgagcggcaccccatcttcggcaacatcgtggacgaggtggcctaccacgagaagtaccccaccatctaccacctgagaaagaaactggtggacagcaccgacaaggccgacctgcggctgatctatctggccctggcccacatgatcaagttccggggccacttcctgatcgagggcgacctgaaccccgacaacagcgacgtggacaagctgttcatccagctggtgcagacctacaaccagctgttcgaggaaaaccccatcaacgccagcggcgtggacgccaaggccatcctgtctgccagactgagcaagagcagacggctggaaaatctgatcgcccagctgcccggcgagaagaagaatggcctgttcggcaacctgattgccctgagcctgggcctgacccccaacttcaagagcaacttcgacctggccgaggatgccaaactgcagctgagcaaggacacctacgacgacgacctggacaacctgctggcccagatcggcgaccagtacgccgacctgtttctggccgccaagaacctgtccgacgccatcctgctgagcgacatcctgagagtgaacaccgagatcaccaaggcccccctgagcgcctctatgatcaagagatacgacgagcaccaccaggacctgaccctgctgaaagctctcgtgcggcagcagctgcctgagaagtacaaagagattttcttcgaccagagcaagaacggctacgccggctacatcgatggcggagccagccaggaagagttctacaagttcatcaagcccatcctggaaaagatggacggcaccgaggaactgctcgtgaagctgaacagagaggacctgctgcggaagcagcggaccttcgacaacggcagcatcccccaccagatccacctgggagagctgcacgccattctgcggcggcaggaagatttttacccattcctgaaggacaaccgggaaaagatcgagaagatcctgaccttccgcatcccctactacgtgggccctctggccaggggaaacagcagattcgcctggatgaccagaaagagcgaggaaaccatcaccccctggaacttcgaggaagtggtggacaagggcgccagcgcccagagcttcatcgagcggatgaccaacttcgataagaacctgcccaacgagaaggtgctgcccaagcacagcctgctgtacgagtacttcaccgtgtacaacgagctgaccaaagtgaaatacgtgaccgagggaatgagaaagcccgccttcctgagcggcgagcagaaaaaagccatcgtggacctgctgttcaagaccaaccggaaagtgaccgtgaagcagctgaaagaggactacttcaagaaaatcgagtgcttcgactccgtggaaatctccggcgtggaagatcggttcaacgcctccctgggcacataccacgatctgctgaaaattatcaaggacaaggacttcctggacaatgaggaaaacgaggacattctggaagatatcgtgctgaccctgacactgtttgaggacagagagatgatcgaggaacggctgaaaacctatgcccacctgttcgacgacaaagtgatgaagcagctgaagcggcggagatacaccggctggggcaggctgagccggaagctgatcaacggcatccgggacaagcagtccggcaagacaatcctggatttcctgaagtccgacggcttcgccaacagaaacttcatgcagctgatccacgacgacagcctgacctttaaagaggacatccagaaagcccaggtgtccggccagggcgatagcctgcacgagcacattgccaatctggccggcagccccgccattaagaagggcatcctgcagacagtgaaggtggtggacgagctcgtgaaagtgatgggccggcacaagcccgagaacatcgtgatcgaaatggccagagagaaccagaccacccagaagggacagaagaacagccgcgagagaatgaagcggatcgaagagggcatcaaagagctgggcagccagatcctgaaagaacaccccgtggaaaacacccagctgcagaacgagaagctgtacctgtactacctgcagaatgggcgggatatgtacgtggaccaggaactggacatcaaccggctgtccgactacgatgtggacgctatcgtgcctcagagctttctgaaggacgactccatcgataacaaagtgctgactcggagcgacaagaaccggggcaagagcgacaacgtgccctccgaagaggtcgtgaagaagatgaagaactactggcgccagctgctgaatgccaagctgattacccagaggaagttcgacaatctgaccaaggccgagagaggcggcctgagcgaactggataaggccggcttcatcaagagacagctggtggaaacccggcagatcacaaagcacgtggcacagatcctggactcccggatgaacactaagtacgacgagaacgacaaactgatccgggaagtgaaagtgatcaccctgaagtccaagctggtgtccgatttccggaaggatttccagttttacaaagtgcgcgagatcaacaactaccaccacgcccacgacgcctacctgaacgccgtcgtgggaaccgccctgatcaaaaagtaccctaagctggaaagcgagttcgtgtacggcgactacaaggtgtacgacgtgcggaagatgatcgccaagagcgagcaggaaatcggcaaggctaccgccaagtacttcttctacagcaacatcatgaactttttcaagaccgagattaccctggccaacggcgagatccggaagcggcctctgatcgagacaaacggcgaaacaggcgagatcgtgtgggataagggccgggactttgccaccgtgcggaaagtgctgtctatgccccaagtgaatatcgtgaaaaagaccgaggtgcagacaggcggcttcagcaaagagtctatcctgcccaagaggaacagcgacaagctgatcgccagaaagaaggactgggaccctaagaagtacggcggcttcgacagccccaccgtggcctattctgtgctggtggtggccaaagtggaaaagggcaagtccaagaaactgaagagtgtgaaagagctgctggggatcaccatcatggaaagaagcagcttcgagaagaatcccatcgactttctggaagccaagggctacaaagaagtgaaaaaggacctgatcatcaagctgcctaagtactccctgttcgagctggaaaacggccggaagagaatgctggcctctgccggcgaactgcagaagggaaacgaactggccctgccctccaaatatgtgaacttcctgtacctggccagccactatgagaagctgaagggctcccccgaggataatgagcagaaacagctgtttgtggaacagcacaaacactacctggacgagatcatcgagcagatcagcgagttctccaagagagtgatcctggccgacgctaatctggacaaggtgctgagcgcctacaacaagcacagagacaagcctatcagagagcaggccgagaatatcatccacctgtttaccctgaccaatctgggagcccctgccgccttcaagtactttgacaccaccatcgaccggaagaggtacaccagcaccaaagaggtgctggacgccaccctgatccaccagagcatcaccggcctgtacgagacacggatcgacctgtctcagctgggaggcgacgcctatccctatgacgtgcccgattatgccagcctgggcagcggctcccccaagaaaaaacgcaaggtggaagatcctaagaaaaagcggaaagtggacggcagcggcagcgagacccccggtaccagcgagagcgccacccccgagagccggacactggtgaccttcaaggatgtatttgtggacttcaccagggaggagtggaagctgctggacactgctcagcagatcgtgtacagaaatgtgatgctggagaactataagaacctggtttccttgggttatcagcttactaagccagatgtgatcctccggttggagaagggagaagagccctgagatcccaagcacgcagcaatgcagctcaaaacgcttagcctagccacacccccacgggaaacagcagtgattaacctttagcaataaacgaaagtttaactaagctatactaaccccagggttggtcaatttcgtgccagccacaccctggtactgcatgcacgcaatgctagctgcccctttcccgtcctgggcaccccgagtctcccccgaccccgggtcccaggtatgctcccacctccacctgccccactcaccacctctgctagttccagacacctccgagacgaggaaaaaaaaaaaaaaaaaaaaaaaaaaaaaaaaaaaaaaaaaaaaaaaaaaaaaaaaaaaaaaaaaaaaaaaaaaaaaaaaaaaaaaaaaaaaaaaaaaaaaaaaaaaaaaaaaaaaaaaa

SEQ ID NO: 332 - DNA, 20 bp, synthetic construct
  misc_feature 1..20: note = gRNA-1(VEGFA)
  source 1..20: mol_type = other DNA
ggggcagccgagctgcagcg

SEQ ID NO: 333 - DNA, 20 bp, synthetic construct
  misc_feature 1..20: note = gRNA-2(VEGFA)
  source 1..20: mol_type = other DNA
cagcgaggccgcggcactgg

SEQ ID NO: 334 - DNA, 19 bp, synthetic construct
  misc_feature 1..19: note = gRNA(CLTA)
  source 1..19: mol_type = other DNA
gaagccctacccgtgtatc

SEQ ID NO: 335 - DNA, 20 bp, synthetic construct
  misc_feature 1..20: note = gRNA-1(PCSK9)
  source 1..20: mol_type = other DNA
aacctgatcctttagtaccg

SEQ ID NO: 336 - DNA, 20 bp, synthetic construct
  misc_feature 1..20: note = gRNA-2(PCSK9)
  source 1..20: mol_type = other DNA
ggatcttccgatggggctcg

SEQ ID NO: 337 - protein, 2161 aa, synthetic construct
  REGION 1..2161: note = V7' fusion
MPAAKRVKLDGSMNHDQEFDPPKVYPPVPAEKRKPIRVLSLFDGIATGLLVLKDLGIQVDRYIASEVCEDSITVGMVRHQGKIMYVGDVRSVTQKHIQEWGPFDLVIGGSPCNDLSIVNPARKGLYEGTGRLFFEFYRLLHDARPKEGDDRPFFWLFENVVAMGVSDKRDISRFLESNPVMIDAKEVSAAHRARYFWGNLPGMNRPLASTVNDKLELQECLEHGRIAKFSKVRTITTRSNSIKQGKDQHFPVFMNEKEDILWCTEMERVFGFPVHYTDVSNMSRLARQRLLGRSWSVPVIRHLFAPLKEYFACVSSGNSNANSRGPSFSSGLVPLSLRGSHMGPMEIYKTVSAWKRQPVRVLSLFRNIDKVLKSLGFLESGSGSGGGTLKYVEDVTNVVRRDVEKWGPFDLVYGSTQPLGSSCDRCPGWYMFQFHRILQYALPRQESQRPFFWIFMDNLLLTEDDQETTTRFLQTEAVTLQDVRGRDYQNAMRVWSNIPGLKSKHAPLTPKEEEYLQAQVRSRSKLDAPKVDLLVKNCLLPLREYFKYFSQNSLPLDGSGSETPGTSESATPESMNNSQGRVTFEDVTVNFTQGEWQRLNPEQRNLYRDVMLENYSNLVSVGQGETTKPDVILRLEQGKEPWLEEEEVLGSGRAEKNGDIGGQIWKPKDVKESLGGPSSGAPPPSGGSPAGSPTSTEEGTSESATPESGPGTSTEPSEGSAPGSPAGSPTSTEEGTSTEPSEGSAPGTSTEPSEPKKKRKVMDKKYSIGLAIGTNSVGWAVITDEYKVPSKKFKVLGNTDRHSIKKNLIGALLFDSGETAEATRLKRTARRRYTRRKNRICYLQEIFSNEMAKVDDSFFHRLEESFLVEEDKKHERHPIFGNIVDEVAYHEKYPTIYHLRKKLVDSTDKADLRLIYLALAHMIKFRGHFLIEGDLNPDNSDVDKLFIQLVQTYNQLFEENPINASGVDAKAILSARLSKSRRLENLIAQLPGEKKNGLFGNLIALSLGLTPNFKSNFDLAEDAKLQLSKDTYDDDLDNLLAQIGDQYADLFLAAKNLSDAILLSDILRVNTEITKAPLSASMIKRYDEHHQDLTLLKALVRQQLPEKYKEIFFDQSKNGYAGYIDGGASQEEFYKFIKPILEKMDGTEELLVKLNREDLLRKQRTFDNGSIPHQIHLGELHAILRRQEDFYPFLKDNREKIEKILTFRIPYYVGPLARGNSRFAWMTRKSEETITPWNFEEVVDKGASAQSFIERMTNFDKNLPNEKVLPKHSLLYEYFTVYNELTKVKYVTEGMRKPAFLSGEQKKAIVDLLFKTNRKVTVKQLKEDYFKKIECFDSVEISGVEDRFNASLGTYHDLLKIIKDKDFLDNEENEDILEDIVLTLTLFEDREMIEERLKTYAHLFDDKVMKQLKRRRYTGWGRLSRKLINGIRDKQSGKTILDFLKSDGFANRNFMQLIHDDSLTFKEDIQKAQVSGQGDSLHEHIANLAGSPAIKKGILQTVKVVDELVKVMGRHKPENIVIEMARENQTTQKGQKNSRERMKRIEEGIKELGSQILKEHPVENTQLQNEKLYLYYLQNGRDMYVDQELDINRLSDYDVDAIVPQSFLKDDSIDNKVLTRSDKNRGKSDNVPSEEVVKKMKNYWRQLLNAKLITQRKFDNLTKAERGGLSELDKAGFIKRQLVETRQITKHVAQILDSRMNTKYDENDKLIREVKVITLKSKLVSDFRKDFQFYKVREINNYHHAHDAYLNAVVGTALIKKYPKLESEFVYGDYKVYDVRKMIAKSEQEIGKATAKYFFYSNIMNFFKTEITLANGEIRKRPLIETNGETGEIVWDKGRDFATVRKVLSMPQVNIVKKTEVQTGGFSKESILPKRNSDKLIARKKDWDPKKYGGFDSPTVAYSVLVVAKVEKGKSKKLKSVKELLGITIMERSSFEKNPIDFLEAKGYKEVKKDLIIKLPKYSLFELENGRKRMLASAGELQKGNELALPSKYVNFLYLASHYEKLKGSPEDNEQKQLFVEQHKHYLDEIIEQISEFSKRVILADANLDKVLSAYNKHRDKPIREQAENIIHLFTLTNLGAPAAFKYFDTTIDRKRYTSTKEVLDATLIHQSITGLYETRIDLSQLGGDAYPYDVPDYASLGSGSPKKKRKVEDPKKKRKV

SEQ ID NO: 338 - protein, 2158 aa, synthetic construct
  REGION 1..2158: note = V8' fusion
MPAAKRVKLDGSNNSQGRVTFEDVTVNFTQGEWQRLNPEQRNLYRDVMLENYSNLVSVGQGETTKPDVILRLEQGKEPWLEEEEVLGSGRAEKNGDIGGQIWKPKDVKESLSGSETPGTSESATPESMNHDQEFDPPKVYPPVPAEKRKPIRVLSLFDGIATGLLVLKDLGIQVDRYIASEVCEDSITVGMVRHQGKIMYVGDVRSVTQKHIQEWGPFDLVIGGSPCNDLSIVNPARKGLYEGTGRLFFEFYRLLHDARPKEGDDRPFFWLFENVVAMGVSDKRDISRFLESNPVMIDAKEVSAAHRARYFWGNLPGMNRPLASTVNDKLELQECLEHGRIAKFSKVRTITTRSNSIKQGKDQHFPVFMNEKEDILWCTEMERVFGFPVHYTDVSNMSRLARQRLLGRSWSVPVIRHLFAPLKEYFACVSSGNSNANSRGPSFSSGLVPLSLRGSHMGPMEIYKTVSAWKRQPVRVLSLFRNIDKVLKSLGFLESGSGSGGGTLKYVEDVTNVVRRDVEKWGPFDLVYGSTQPLGSSCDRCPGWYMFQFHRILQYALPRQESQRPFFWIFMDNLLLTEDDQETTTRFLQTEAVTLQDVRGRDYQNAMRVWSNIPGLKSKHAPLTPKEEEYLQAQVRSRSKLDAPKVDLLVKNCLLPLREYFKYFSQNSLPLGGPSSGAPPPSGGSPAGSPTSTEEGTSESATPESGPGTSTEPSEGSAPGSPAGSPTSTEEGTSTEPSEGSAPGTSTEPSEPKKKRKVMDKKYSIGLAIGTNSVGWAVITDEYKVPSKKFKVLGNTDRHSIKKNLIGALLFDSGETAEATRLKRTARRRYTRRKNRICYLQEIFSNEMAKVDDSFFHRLEESFLVEEDKKHERHPIFGNIVDEVAYHEKYPTIYHLRKKLVDSTDKADLRLIYLALAHMIKFRGHFLIEGDLNPDNSDVDKLFIQLVQTYNQLFEENPINASGVDAKAILSARLSKSRRLENLIAQLPGEKKNGLFGNLIALSLGLTPNFKSNFDLAEDAKLQLSKDTYDDDLDNLLAQIGDQYADLFLAAKNLSDAILLSDILRVNTEITKAPLSASMIKRYDEHHQDLTLLKALVRQQLPEKYKEIFFDQSKNGYAGYIDGGASQEEFYKFIKPILEKMDGTEELLVKLNREDLLRKQRTFDNGSIPHQIHLGELHAILRRQEDFYPFLKDNREKIEKILTFRIPYYVGPLARGNSRFAWMTRKSEETITPWNFEEVVDKGASAQSFIERMTNFDKNLPNEKVLPKHSLLYEYFTVYNELTKVKYVTEGMRKPAFLSGEQKKAIVDLLFKTNRKVTVKQLKEDYFKKIECFDSVEISGVEDRFNASLGTYHDLLKIIKDKDFLDNEENEDILEDIVLTLTLFEDREMIEERLKTYAHLFDDKVMKQLKRRRYTGWGRLSRKLINGIRDKQSGKTILDFLKSDGFANRNFMQLIHDDSLTFKEDIQKAQVSGQGDSLHEHIANLAGSPAIKKGILQTVKVVDELVKVMGRHKPENIVIEMARENQTTQKGQKNSRERMKRIEEGIKELGSQILKEHPVENTQLQNEKLYLYYLQNGRDMYVDQELDINRLSDYDVDAIVPQSFLKDDSIDNKVLTRSDKNRGKSDNVPSEEVVKKMKNYWRQLLNAKLITQRKFDNLTKAERGGLSELDKAGFIKRQLVETRQITKHVAQILDSRMNTKYDENDKLIREVKVITLKSKLVSDFRKDFQFYKVREINNYHHAHDAYLNAVVGTALIKKYPKLESEFVYGDYKVYDVRKMIAKSEQEIGKATAKYFFYSNIMNFFKTEITLANGEIRKRPLIETNGETGEIVWDKGRDFATVRKVLSMPQVNIVKKTEVQTGGFSKESILPKRNSDKLIARKKDWDPKKYGGFDSPTVAYSVLVVAKVEKGKSKKLKSVKELLGITIMERSSFEKNPIDFLEAKGYKEVKKDLIIKLPKYSLFELENGRKRMLASAGELQKGNELALPSKYVNFLYLASHYEKLKGSPEDNEQKQLFVEQHKHYLDEIIEQISEFSKRVILADANLDKVLSAYNKHRDKPIREQAENIIHLFTLTNLGAPAAFKYFDTTIDRKRYTSTKEVLDATLIHQSITGLYETRIDLSQLGGDAYPYDVPDYASLGSGSPKKKRKVEDPKKKRKV

SEQ ID NO: 339 - protein, 2156 aa, synthetic construct
  REGION 1..2156: note = V9' fusion
MPAAKRVKLDGSMDKKYSIGLAIGTNSVGWAVITDEYKVPSKKFKVLGNTDRHSIKKNLIGALLFDSGETAEATRLKRTARRRYTRRKNRICYLQEIFSNEMAKVDDSFFHRLEESFLVEEDKKHERHPIFGNIVDEVAYHEKYPTIYHLRKKLVDSTDKADLRLIYLALAHMIKFRGHFLIEGDLNPDNSDVDKLFIQLVQTYNQLFEENPINASGVDAKAILSARLSKSRRLENLIAQLPGEKKNGLFGNLIALSLGLTPNFKSNFDLAEDAKLQLSKDTYDDDLDNLLAQIGDQYADLFLAAKNLSDAILLSDILRVNTEITKAPLSASMIKRYDEHHQDLTLLKALVRQQLPEKYKEIFFDQSKNGYAGYIDGGASQEEFYKFIKPILEKMDGTEELLVKLNREDLLRKQRTFDNGSIPHQIHLGELHAILRRQEDFYPFLKDNREKIEKILTFRIPYYVGPLARGNSRFAWMTRKSEETITPWNFEEVVDKGASAQSFIERMTNFDKNLPNEKVLPKHSLLYEYFTVYNELTKVKYVTEGMRKPAFLSGEQKKAIVDLLFKTNRKVTVKQLKEDYFKKIECFDSVEISGVEDRFNASLGTYHDLLKIIKDKDFLDNEENEDILEDIVLTLTLFEDREMIEERLKTYAHLFDDKVMKQLKRRRYTGWGRLSRKLINGIRDKQSGKTILDFLKSDGFANRNFMQLIHDDSLTFKEDIQKAQVSGQGDSLHEHIANLAGSPAIKKGILQTVKVVDELVKVMGRHKPENIVIEMARENQTTQKGQKNSRERMKRIEEGIKELGSQILKEHPVENTQLQNEKLYLYYLQNGRDMYVDQELDINRLSDYDVDAIVPQSFLKDDSIDNKVLTRSDKNRGKSDNVPSEEVVKKMKNYWRQLLNAKLITQRKFDNLTKAERGGLSELDKAGFIKRQLVETRQITKHVAQILDSRMNTKYDENDKLIREVKVITLKSKLVSDFRKDFQFYKVREINNYHHAHDAYLNAVVGTALIKKYPKLESEFVYGDYKVYDVRKMIAKSEQEIGKATAKYFFYSNIMNFFKTEITLANGEIRKRPLIETNGETGEIVWDKGRDFATVRKVLSMPQVNIVKKTEVQTGGFSKESILPKRNSDKLIARKKDWDPKKYGGFDSPTVAYSVLVVAKVEKGKSKKLKSVKELLGITIMERSSFEKNPIDFLEAKGYKEVKKDLIIKLPKYSLFELENGRKRMLASAGELQKGNELALPSKYVNFLYLASHYEKLKGSPEDNEQKQLFVEQHKHYLDEIIEQISEFSKRVILADANLDKVLSAYNKHRDKPIREQAENIIHLFTLTNLGAPAAFKYFDTTIDRKRYTSTKEVLDATLIHQSITGLYETRIDLSQLGGDAYPYDVPDYASLGSGSPKKKRKVEDPKKKRKVDGGGPSSGAPPPSGGSPAGSPTSTEEGTSESATPESGPGTSTEPSEGSAPGSPAGSPTSTEEGTSTEPSEGSAPGTSTEPSEMNHDQEFDPPKVYPPVPAEKRKPIRVLSLFDGIATGLLVLKDLGIQVDRYIASEVCEDSITVGMVRHQGKIMYVGDVRSVTQKHIQEWGPFDLVIGGSPCNDLSIVNPARKGLYEGTGRLFFEFYRLLHDARPKEGDDRPFFWLFENVVAMGVSDKRDISRFLESNPVMIDAKEVSAAHRARYFWGNLPGMNRPLASTVNDKLELQECLEHGRIAKFSKVRTITTRSNSIKQGKDQHFPVFMNEKEDILWCTEMERVFGFPVHYTDVSNMSRLARQRLLGRSWSVPVIRHLFAPLKEYFACVSSGNSNANSRGPSFSSGLVPLSLRGSHMGPMEIYKTVSAWKRQPVRVLSLFRNIDKVLKSLGFLESGSGSGGGTLKYVEDVTNVVRRDVEKWGPFDLVYGSTQPLGSSCDRCPGWYMFQFHRILQYALPRQESQRPFFWIFMDNLLLTEDDQETTTRFLQTEAVTLQDVRGRDYQNAMRVWSNIPGLKSKHAPLTPKEEEYLQAQVRSRSKLDAPKVDLLVKNCLLPLREYFKYFSQNSLPLDGSGSETPGTSESATPESMNNSQGRVTFEDVTVNFTQGEWQRLNPEQRNLYRDVMLENYSNLVSVGQGETTKPDVILRLEQGKEPWLEEEEVLGSGRAEKNGDIGGQIWKPKDVKESL

SEQ ID NO: 340 - protein, 2154 aa, synthetic construct
  REGION 1..2154: note = V10' fusion
MPAAKRVKLDGSMDKKYSIGLAIGTNSVGWAVITDEYKVPSKKFKVLGNTDRHSIKKNLIGALLFDSGETAEATRLKRTARRRYTRRKNRICYLQEIFSNEMAKVDDSFFHRLEESFLVEEDKKHERHPIFGNIVDEVAYHEKYPTIYHLRKKLVDSTDKADLRLIYLALAHMIKFRGHFLIEGDLNPDNSDVDKLFIQLVQTYNQLFEENPINASGVDAKAILSARLSKSRRLENLIAQLPGEKKNGLFGNLIALSLGLTPNFKSNFDLAEDAKLQLSKDTYDDDLDNLLAQIGDQYADLFLAAKNLSDAILLSDILRVNTEITKAPLSASMIKRYDEHHQDLTLLKALVRQQLPEKYKEIFFDQSKNGYAGYIDGGASQEEFYKFIKPILEKMDGTEELLVKLNREDLLRKQRTFDNGSIPHQIHLGELHAILRRQEDFYPFLKDNREKIEKILTFRIPYYVGPLARGNSRFAWMTRKSEETITPWNFEEVVDKGASAQSFIERMTNFDKNLPNEKVLPKHSLLYEYFTVYNELTKVKYVTEGMRKPAFLSGEQKKAIVDLLFKTNRKVTVKQLKEDYFKKIECFDSVEISGVEDRFNASLGTYHDLLKIIKDKDFLDNEENEDILEDIVLTLTLFEDREMIEERLKTYAHLFDDKVMKQLKRRRYTGWGRLSRKLINGIRDKQSGKTILDFLKSDGFANRNFMQLIHDDSLTFKEDIQKAQVSGQGDSLHEHIANLAGSPAIKKGILQTVKVVDELVKVMGRHKPENIVIEMARENQTTQKGQKNSRERMKRIEEGIKELGSQILKEHPVENTQLQNEKLYLYYLQNGRDMYVDQELDINRLSDYDVDAIVPQSFLKDDSIDNKVLTRSDKNRGKSDNVPSEEVVKKMKNYWRQLLNAKLITQRKFDNLTKAERGGLSELDKAGFIKRQLVETRQITKHVAQILDSRMNTKYDENDKLIREVKVITLKSKLVSDFRKDFQFYKVREINNYHHAHDAYLNAVVGTALIKKYPKLESEFVYGDYKVYDVRKMIAKSEQEIGKATAKYFFYSNIMNFFKTEITLANGEIRKRPLIETNGETGEIVWDKGRDFATVRKVLSMPQVNIVKKTEVQTGGFSKESILPKRNSDKLIARKKDWDPKKYGGFDSPTVAYSVLVVAKVEKGKSKKLKSVKELLGITIMERSSFEKNPIDFLEAKGYKEVKKDLIIKLPKYSLFELENGRKRMLASAGELQKGNELALPSKYVNFLYLASHYEKLKGSPEDNEQKQLFVEQHKHYLDEIIEQISEFSKRVILADANLDKVLSAYNKHRDKPIREQAENIIHLFTLTNLGAPAAFKYFDTTIDRKRYTSTKEVLDATLIHQSITGLYETRIDLSQLGGDAYPYDVPDYASLGSGSPKKKRKVEDPKKKRKVDGGGPSSGAPPPSGGSPAGSPTSTEEGTSESATPESGPGTSTEPSEGSAPGSPAGSPTSTEEGTSTEPSEGSAPGTSTEPSEMNNSQGRVTFEDVTVNFTQGEWQRLNPEQRNLYRDVMLENYSNLVSVGQGETTKPDVILRLEQGKEPWLEEEEVLGSGRAEKNGDIGGQIWKPKDVKESLSGSETPGTSESATPESMNHDQEFDPPKVYPPVPAEKRKPIRVLSLFDGIATGLLVLKDLGIQVDRYIASEVCEDSITVGMVRHQGKIMYVGDVRSVTQKHIQEWGPFDLVIGGSPCNDLSIVNPARKGLYEGTGRLFFEFYRLLHDARPKEGDDRPFFWLFENVVAMGVSDKRDISRFLESNPVMIDAKEVSAAHRARYFWGNLPGMNRPLASTVNDKLELQECLEHGRIAKFSKVRTITTRSNSIKQGKDQHFPVFMNEKEDILWCTEMERVFGFPVHYTDVSNMSRLARQRLLGRSWSVPVIRHLFAPLKEYFACVSSGNSNANSRGPSFSSGLVPLSLRGSHMGPMEIYKTVSAWKRQPVRVLSLFRNIDKVLKSLGFLESGSGSGGGTLKYVEDVTNVVRRDVEKWGPFDLVYGSTQPLGSSCDRCPGWYMFQFHRILQYALPRQESQRPFFWIFMDNLLLTEDDQETTTRFLQTEAVTLQDVRGRDYQNAMRVWSNIPGLKSKHAPLTPKEEEYLQAQVRSRSKLDAPKVDLLVKNCLLPLREYFKYFSQNSLPL

SEQ ID NO: 341 - protein, 2154 aa, synthetic construct
  REGION 1..2154: note = V11' fusion
MPAAKRVKLDGSMDKKYSIGLAIGTNSVGWAVITDEYKVPSKKFKVLGNTDRHSIKKNLIGALLFDSGETAEATRLKRTARRRYTRRKNRICYLQEIFSNEMAKVDDSFFHRLEESFLVEEDKKHERHPIFGNIVDEVAYHEKYPTIYHLRKKLVDSTDKADLRLIYLALAHMIKFRGHFLIEGDLNPDNSDVDKLFIQLVQTYNQLFEENPINASGVDAKAILSARLSKSRRLENLIAQLPGEKKNGLFGNLIALSLGLTPNFKSNFDLAEDAKLQLSKDTYDDDLDNLLAQIGDQYADLFLAAKNLSDAILLSDILRVNTEITKAPLSASMIKRYDEHHQDLTLLKALVRQQLPEKYKEIFFDQSKNGYAGYIDGGASQEEFYKFIKPILEKMDGTEELLVKLNREDLLRKQRTFDNGSIPHQIHLGELHAILRRQEDFYPFLKDNREKIEKILTFRIPYYVGPLARGNSRFAWMTRKSEETITPWNFEEVVDKGASAQSFIERMTNFDKNLPNEKVLPKHSLLYEYFTVYNELTKVKYVTEGMRKPAFLSGEQKKAIVDLLFKTNRKVTVKQLKEDYFKKIECFDSVEISGVEDRFNASLGTYHDLLKIIKDKDFLDNEENEDILEDIVLTLTLFEDREMIEERLKTYAHLFDDKVMKQLKRRRYTGWGRLSRKLINGIRDKQSGKTILDFLKSDGFANRNFMQLIHDDSLTFKEDIQKAQVSGQGDSLHEHIANLAGSPAIKKGILQTVKVVDELVKVMGRHKPENIVIEMARENQTTQKGQKNSRERMKRIEEGIKELGSQILKEHPVENTQLQNEKLYLYYLQNGRDMYVDQELDINRLSDYDVDAIVPQSFLKDDSIDNKVLTRSDKNRGKSDNVPSEEVVKKMKNYWRQLLNAKLITQRKFDNLTKAERGGLSELDKAGFIKRQLVETRQITKHVAQILDSRMNTKYDENDKLIREVKVITLKSKLVSDFRKDFQFYKVREINNYHHAHDAYLNAVVGTALIKKYPKLESEFVYGDYKVYDVRKMIAKSEQEIGKATAKYFFYSNIMNFFKTEITLANGEIRKRPLIETNGETGEIVWDKGRDFATVRKVLSMPQVNIVKKTEVQTGGFSKESILPKRNSDKLIARKKDWDPKKYGGFDSPTVAYSVLVVAKVEKGKSKKLKSVKELLGITIMERSSFEKNPIDFLEAKGYKEVKKDLIIKLPKYSLFELENGRKRMLASAGELQKGNELALPSKYVNFLYLASHYEKLKGSPEDNEQKQLFVEQHKHYLDEIIEQISEFSKRVILADANLDKVLSAYNKHRDKPIREQAENIIHLFTLTNLGAPAAFKYFDTTIDRKRYTSTKEVLDATLIHQSITGLYETRIDLSQLGGDAYPYDVPDYASLGSGSPKKKRKVEDPKKKRKVDGGGPSSGAPPPSGGSPAGSPTSTEEGTSESATPESGPGTSTEPSEGSAPGSPAGSPTSTEEGTSTEPSEGSAPGTSTEPSEMNNSQGRVTFEDVTVNFTQGEWQRLNPEQRNLYRDVMLENYSNLVSVGQGETTKPDVILRLEQGKEPWLEEEEVLGSGRAEKNGDIGGQIWKPKDVKESLSGSETPGTSESATPESMGPMEIYKTVSAWKRQPVRVLSLFRNIDKVLKSLGFLESGSGSGGGTLKYVEDVTNVVRRDVEKWGPFDLVYGSTQPLGSSCDRCPGWYMFQFHRILQYALPRQESQRPFFWIFMDNLLLTEDDQETTTRFLQTEAVTLQDVRGRDYQNAMRVWSNIPGLKSKHAPLTPKEEEYLQAQVRSRSKLDAPKVDLLVKNCLLPLREYFKYFSQNSLPLSSGNSNANSRGPSFSSGLVPLSLRGSHMNHDQEFDPPKVYPPVPAEKRKPIRVLSLFDGIATGLLVLKDLGIQVDRYIASEVCEDSITVGMVRHQGKIMYVGDVRSVTQKHIQEWGPFDLVIGGSPCNDLSIVNPARKGLYEGTGRLFFEFYRLLHDARPKEGDDRPFFWLFENVVAMGVSDKRDISRFLESNPVMIDAKEVSAAHRARYFWGNLPGMNRPLASTVNDKLELQECLEHGRIAKFSKVRTITTRSNSIKQGKDQHFPVFMNEKEDILWCTEMERVFGFPVHYTDVSNMSRLARQRLLGRSWSVPVIRHLFAPLKEYFACV

SEQ ID NO: 342 - protein, 2234 aa, synthetic construct
  REGION 1..2234: note = V14' fusion
MPAAKRVKLDGSMDKKYSIGLAIGTNSVGWAVITDEYKVPSKKFKVLGNTDRHSIKKNLIGALLFDSGETAEATRLKRTARRRYTRRKNRICYLQEIFSNEMAKVDDSFFHRLEESFLVEEDKKHERHPIFGNIVDEVAYHEKYPTIYHLRKKLVDSTDKADLRLIYLALAHMIKFRGHFLIEGDLNPDNSDVDKLFIQLVQTYNQLFEENPINASGVDAKAILSARLSKSRRLENLIAQLPGEKKNGLFGNLIALSLGLTPNFKSNFDLAEDAKLQLSKDTYDDDLDNLLAQIGDQYADLFLAAKNLSDAILLSDILRVNTEITKAPLSASMIKRYDEHHQDLTLLKALVRQQLPEKYKEIFFDQSKNGYAGYIDGGASQEEFYKFIKPILEKMDGTEELLVKLNREDLLRKQRTFDNGSIPHQIHLGELHAILRRQEDFYPFLKDNREKIEKILTFRIPYYVGPLARGNSRFAWMTRKSEETITPWNFEEVVDKGASAQSFIERMTNFDKNLPNEKVLPKHSLLYEYFTVYNELTKVKYVTEGMRKPAFLSGEQKKAIVDLLFKTNRKVTVKQLKEDYFKKIECFDSVEISGVEDRFNASLGTYHDLLKIIKDKDFLDNEENEDILEDIVLTLTLFEDREMIEERLKTYAHLFDDKVMKQLKRRRYTGWGRLSRKLINGIRDKQSGKTILDFLKSDGFANRNFMQLIHDDSLTFKEDIQKAQVSGQGDSLHEHIANLAGSPAIKKGILQTVKVVDELVKVMGRHKPENIVIEMARENQTTQKGQKNSRERMKRIEEGIKELGSQILKEHPVENTQLQNEKLYLYYLQNGRDMYVDQELDINRLSDYDVDAIVPQSFLKDDSIDNKVLTRSDKNRGKSDNVPSEEVVKKMKNYWRQLLNAKLITQRKFDNLTKAERGGLSELDKAGFIKRQLVETRQITKHVAQILDSRMNTKYDENDKLIREVKVITLKSKLVSDFRKDFQFYKVREINNYHHAHDAYLNAVVGTALIKKYPKLESEFVYGDYKVYDVRKMIAKSEQEIGKATAKYFFYSNIMNFFKTEITLANGEIRKRPLIETNGETGEIVWDKGRDFATVRKVLSMPQVNIVKKTEVQTGGFSKESILPKRNSDKLIARKKDWDPKKYGGFDSPTVAYSVLVVAKVEKGKSKKLKSVKELLGITIMERSSFEKNPIDFLEAKGYKEVKKDLIIKLPKYSLFELENGRKRMLASAGELQKGNELALPSKYVNFLYLASHYEKLKGSPEDNEQKQLFVEQHKHYLDEIIEQISEFSKRVILADANLDKVLSAYNKHRDKPIREQAENIIHLFTLTNLGAPAAFKYFDTTIDRKRYTSTKEVLDATLIHQSITGLYETRIDLSQLGGDAYPYDVPDYASLGSGSPKKKRKVEDPKKKRKVDGGGPSSGAPPPSGGSPAGSPTSTEEGTSESATPESGPGTSTEPSEGSAPGSPAGSPTSTEEGTSTEPSEGSAPGTSTEPSEMNNSQGRVTFEDVTVNFTQGEWQRLNPEQRNLYRDVMLENYSNLVSVGQGETTKPDVILRLEQGKEPWLEEEEVLGSGRAEKNGDIGGQIWKPKDVKESLSGSETPGTSEGGPSSGAPPPSGGSPAGSPTSTEEGTSESATPESGPGTSTEPSEGSAPGSPAGSPTSTEEGTSTEPSEGSAPGTSTEPSESATPESMGPMEIYKTVSAWKRQPVRVLSLFRNIDKVLKSLGFLESGSGSGGGTLKYVEDVTNVVRRDVEKWGPFDLVYGSTQPLGSSCDRCPGWYMFQFHRILQYALPRQESQRPFFWIFMDNLLLTEDDQETTTRFLQTEAVTLQDVRGRDYQNAMRVWSNIPGLKSKHAPLTPKEEEYLQAQVRSRSKLDAPKVDLLVKNCLLPLREYFKYFSQNSLPLSSGNSNANSRGPSFSSGLVPLSLRGSHMNHDQEFDPPKVYPPVPAEKRKPIRVLSLFDGIATGLLVLKDLGIQVDRYIASEVCEDSITVGMVRHQGKIMYVGDVRSVTQKHIQEWGPFDLVIGGSPCNDLSIVNPARKGLYEGTGRLFFEFYRLLHDARPKEGDDRPFFWLFENVVAMGVSDKRDISRFLESNPVMIDAKEVSAAHRARYFWGNLPGMNRPLASTVNDKLELQECLEHGRIAKFSKVRTITTRSNSIKQGKDQHFPVFMNEKEDILWCTEMERVFGFPVHYTDVSNMSRLARQRLLGRSWSVPVIRHLFAPLKEYFACV

SEQ ID NO: 343 - protein, 2230 aa, synthetic construct
  REGION 1..2230: note = V15' fusion
MPAAKRVKLDGSMDKKYSIGLAIGTNSVGWAVITDEYKVPSKKFKVLGNTDRHSIKKNLIGALLFDSGETAEATRLKRTARRRYTRRKNRICYLQEIFSNEMAKVDDSFFHRLEESFLVEEDKKHERHPIFGNIVDEVAYHEKYPTIYHLRKKLVDSTDKADLRLIYLALAHMIKFRGHFLIEGDLNPDNSDVDKLFIQLVQTYNQLFEENPINASGVDAKAILSARLSKSRRLENLIAQLPGEKKNGLFGNLIALSLGLTPNFKSNFDLAEDAKLQLSKDTYDDDLDNLLAQIGDQYADLFLAAKNLSDAILLSDILRVNTEITKAPLSASMIKRYDEHHQDLTLLKALVRQQLPEKYKEIFFDQSKNGYAGYIDGGASQEEFYKFIKPILEKMDGTEELLVKLNREDLLRKQRTFDNGSIPHQIHLGELHAILRRQEDFYPFLKDNREKIEKILTFRIPYYVGPLARGNSRFAWMTRKSEETITPWNFEEVVDKGASAQSFIERMTNFDKNLPNEKVLPKHSLLYEYFTVYNELTKVKYVTEGMRKPAFLSGEQKKAIVDLLFKTNRKVTVKQLKEDYFKKIECFDSVEISGVEDRFNASLGTYHDLLKIIKDKDFLDNEENEDILEDIVLTLTLFEDREMIEERLKTYAHLFDDKVMKQLKRRRYTGWGRLSRKLINGIRDKQSGKTILDFLKSDGFANRNFMQLIHDDSLTFKEDIQKAQVSGQGDSLHEHIANLAGSPAIKKGILQTVKVVDELVKVMGRHKPENIVIEMARENQTTQKGQKNSRERMKRIEEGIKELGSQILKEHPVENTQLQNEKLYLYYLQNGRDMYVDQELDINRLSDYDVDAIVPQSFLKDDSIDNKVLTRSDKNRGKSDNVPSEEVVKKMKNYWRQLLNAKLITQRKFDNLTKAERGGLSELDKAGFIKRQLVETRQITKHVAQILDSRMNTKYDENDKLIREVKVITLKSKLVSDFRKDFQFYKVREINNYHHAHDAYLNAVVGTALIKKYPKLESEFVYGDYKVYDVRKMIAKSEQEIGKATAKYFFYSNIMNFFKTEITLANGEIRKRPLIETNGETGEIVWDKGRDFATVRKVLSMPQVNIVKKTEVQTGGFSKESILPKRNSDKLIARKKDWDPKKYGGFDSPTVAYSVLVVAKVEKGKSKKLKSVKELLGITIMERSSFEKNPIDFLEAKGYKEVKKDLIIKLPKYSLFELENGRKRMLASAGELQKGNELALPSKYVNFLYLASHYEKLKGSPEDNEQKQLFVEQHKHYLDEIIEQISEFSKRVILADANLDKVLSAYNKHRDKPIREQAENIIHLFTLTNLGAPAAFKYFDTTIDRKRYTSTKEVLDATLIHQSITGLYETRIDLSQLGGDAYPYDVPDYASLGSGSPKKKRKVEDPKKKRKVDGGGPSSGAPPPSGGSPAGSPTSTEEGTSESATPESGPGTSTEPSEGSAPGSPAGSPTSTEEGTSTEPSEGSAPGTSTEPSEMNNSQGRVTFEDVTVNFTQGEWQRLNPEQRNLYRDVMLENYSNLVSVGQGETTKPDVILRLEQGKEPWLEEEEVLGSGRAEKNGDIGGQIWKPKDVKESLSGSETPGTSESATPESGPGSPAGSPTSTEEGTSESATPESGPGSEPATSGSETPGTSESATPESGPGTSTEPSEGSAPGTSTEPSESATPESMGPMEIYKTVSAWKRQPVRVLSLFRNIDKVLKSLGFLESGSGSGGGTLKYVEDVTNVVRRDVEKWGPFDLVYGSTQPLGSSCDRCPGWYMFQFHRILQYALPRQESQRPFFWIFMDNLLLTEDDQETTTRFLQTEAVTLQDVRGRDYQNAMRVWSNIPGLKSKHAPLTPKEEEYLQAQVRSRSKLDAPKVDLLVKNCLLPLREYFKYFSQNSLPLSSGNSNANSRGPSFSSGLVPLSLRGSHMNHDQEFDPPKVYPPVPAEKRKPIRVLSLFDGIATGLLVLKDLGIQVDRYIASEVCEDSITVGMVRHQGKIMYVGDVRSVTQKHIQEWGPFDLVIGGSPCNDLSIVNPARKGLYEGTGRLFFEFYRLLHDARPKEGDDRPFFWLFENVVAMGVSDKRDISRFLESNPVMIDAKEVSAAHRARYFWGNLPGMNRPLASTVNDKLELQECLEHGRIAKFSKVRTITTRSNSIKQGKDQHFPVFMNEKEDILWCTEMERVFGFPVHYTDVSNMSRLARQRLLGRSWSVPVIRHLFAPLKEYFACV

SEQ ID NO: 344 - protein, 2218 aa, synthetic construct
  REGION 1..2218: note = V16' fusion
MPAAKRVKLDGSMDKKYSIGLAIGTNSVGWAVITDEYKVPSKKFKVLGNTDRHSIKKNLIGALLFDSGETAEATRLKRTARRRYTRRKNRICYLQEIFSNEMAKVDDSFFHRLEESFLVEEDKKHERHPIFGNIVDEVAYHEKYPTIYHLRKKLVDSTDKADLRLIYLALAHMIKFRGHFLIEGDLNPDNSDVDKLFIQLVQTYNQLFEENPINASGVDAKAILSARLSKSRRLENLIAQLPGEKKNGLFGNLIALSLGLTPNFKSNFDLAEDAKLQLSKDTYDDDLDNLLAQIGDQYADLFLAAKNLSDAILLSDILRVNTEITKAPLSASMIKRYDEHHQDLTLLKALVRQQLPEKYKEIFFDQSKNGYAGYIDGGASQEEFYKFIKPILEKMDGTEELLVKLNREDLLRKQRTFDNGSIPHQIHLGELHAILRRQEDFYPFLKDNREKIEKILTFRIPYYVGPLARGNSRFAWMTRKSEETITPWNFEEVVDKGASAQSFIERMTNFDKNLPNEKVLPKHSLLYEYFTVYNELTKVKYVTEGMRKPAFLSGEQKKAIVDLLFKTNRKVTVKQLKEDYFKKIECFDSVEISGVEDRFNASLGTYHDLLKIIKDKDFLDNEENEDILEDIVLTLTLFEDREMIEERLKTYAHLFDDKVMKQLKRRRYTGWGRLSRKLINGIRDKQSGKTILDFLKSDGFANRNFMQLIHDDSLTFKEDIQKAQVSGQGDSLHEHIANLAGSPAIKKGILQTVKVVDELVKVMGRHKPENIVIEMARENQTTQKGQKNSRERMKRIEEGIKELGSQILKEHPVENTQLQNEKLYLYYLQNGRDMYVDQELDINRLSDYDVDAIVPQSFLKDDSIDNKVLTRSDKNRGKSDNVPSEEVVKKMKNYWRQLLNAKLITQRKFDNLTKAERGGLSELDKAGFIKRQLVETRQITKHVAQILDSRMNTKYDENDKLIREVKVITLKSKLVSDFRKDFQFYKVREINNYHHAHDAYLNAVVGTALIKKYPKLESEFVYGDYKVYDVRKMIAKSEQEIGKATAKYFFYSNIMNFFKTEITLANGEIRKRPLIETNGETGEIVWDKGRDFATVRKVLSMPQVNIVKKTEVQTGGFSKESILPKRNSDKLIARKKDWDPKKYGGFDSPTVAYSVLVVAKVEKGKSKKLKSVKELLGITIMERSSFEKNPIDFLEAKGYKEVKKDLIIKLPKYSLFELENGRKRMLASAGELQKGNELALPSKYVNFLYLASHYEKLKGSPEDNEQKQLFVEQHKHYLDEIIEQISEFSKRVILADANLDKVLSAYNKHRDKPIREQAENIIHLFTLTNLGAPAAFKYFDTTIDRKRYTSTKEVLDATLIHQSITGLYETRIDLSQLGGDAYPYDVPDYASLGSGSPKKKRKVEDPKKKRKVDGGGPSSGAPPPSGGSPAGSPTSTEEGTSESATPESGPGTSTEPSEGSAPGSPAGSPTSTEEGTSTEPSEGSAPGTSTEPSEMNNSQGRVTFEDVTVNFTQGEWQRLNPEQRNLYRDVMLENYSNLVSVGQGETTKPDVILRLEQGKEPWLEEEEVLGSGRAEKNGDIGGQIWKPKDVKESLSGSETPGTSESATPESGPGSPAGSPTSTEEGTSESATPESGPGSEPATSGSETPGTSESATPESGPGTSTEPSEGSAPGTSTEPSESATPESMFETVPVWRRQPVRVLSLFEDIKKELTSLGFLESGSDPGQLKHVVDVTDTVRKDVEEWGPFDLVYGATPPLGHTCDRPPSWYLFQFHRLLQYARPKPGSPRPFFWMFVDNLVLNKEDLDVASRFLEMEPVTIPDVHGGSLQNAVRVWSNIPAIRSSRHWALVSEEELSLLAQNKQSSKLAAKWPTKLVKNCFLPLREYFKYFSSSGNSNANSRGPSFSSGLVPLSLRGSHMNHDQEFDPPKVYPPVPAEKRKPIRVLSLFDGIATGLLVLKDLGIQVDRYIASEVCEDSITVGMVRHQGKIMYVGDVRSVTQKHIQEWGPFDLVIGGSPCNDLSIVNPARKGLYEGTGRLFFEFYRLLHDARPKEGDDRPFFWLFENVVAMGVSDKRDISRFLESNPVMIDAKEVSAAHRARYFWGNLPGMNRPLASTVNDKLELQECLEHGRIAKFSKVRTITTRSNSIKQGKDQHFPVFMNEKEDILWCTEMERVFGFPVHYTDVSNMSRLARQRLLGRSWSVPVIRHLFAPLKEYFACV

SEQ ID NO: 345 - DNA, 6483 bp, synthetic construct
  misc_feature 1..6483: note = V7' DNA
  source 1..6483: mol_type = other DNA
atgcctgctgctaagagagtgaaactggatggatccatgaaccatgaccaggaatttgaccccccaaaggtttacccacctgtgccagctgagaagaggaagcccatccgcgtgctgtctctctttgatgggattgctacagggctcctggtgctgaaggacctgggcatccaagtggaccgctacattgcctccgaggtgtgtgaggactccatcacggtgggcatggtgcggcaccagggaaagatcatgtacgtcggggacgtccgcagcgtcacacagaagcatatccaggagtggggcccattcgacctggtgattggaggcagtccctgcaatgacctctccattgtcaaccctgcccgcaagggactttatgagggtactggccgcctcttctttgagttctaccgcctcctgcatgatgcgcggcccaaggagggagatgatcgccccttcttctggctctttgagaatgtggtggccatgggcgttagtgacaagagggacatctcgcgatttcttgagtctaaccccgtgatgattgacgccaaagaagtgtctgctgcacacagggcccgttacttctggggtaaccttcctggcatgaacaggcctttggcatccactgtgaatgataagctggagctgcaagagtgtctggagcacggcagaatagccaagttcagcaaagtgaggaccattaccaccaggtcaaactctataaagcagggcaaagaccagcatttccccgtcttcatgaacgagaaggaggacatcctgtggtgcactgaaatggaaagggtgtttggcttccccgtccactacacagacgtctccaacatgagccgcttggcgaggcagagactgctgggccgatcgtggagcgtgccggtcatccgccacctcttcgctccgctgaaggaatattttgcttgtgtgtctagcggcaatagtaacgctaacagccgcgggccgagcttcagcagcggcctggtgccgttaagcttgcgcggcagccatatgggccctatggagatatacaagacagtgtctgcatggaagagacagccagtgcgggtactgagcctcttcagaaacatcgacaaggtactaaagagtttgggcttcttggaaagcggttctggttctgggggaggaacgctgaagtacgtggaagatgtcacaaatgtcgtgaggagagacgtggagaaatggggcccctttgacctggtgtacggctcgacgcagcccctaggcagctcttgtgatcgctgtcccggctggtacatgttccagttccaccggatcctgcagtatgcgctgcctcgccaggagagtcagcggcccttcttctggatattcatggacaatctgctgctgactgaggatgaccaagagacaactacccgcttccttcagacagaggctgtgaccctccaggatgtccgtggcagagactaccagaatgctatgcgggtgtggagcaacattccagggctgaagagcaagcatgcgcccctgaccccaaaggaagaagagtatctgcaagcccaagtcagaagcaggagcaagctggacgccccgaaagttgacctcctggtgaagaactgccttctcccgctgagagagtacttcaagtatttttctcaaaactcacttcctcttgacggcagcggcagcgagacccccggtaccagcgagagcgccacccccgagagcatgaacaattcccagggaagagtgaccttcgaggatgtcactgtgaacttcacccagggggagtggcagcggctgaatcccgaacagagaaacttgtacagggatgtgatgctggagaattacagcaaccttgtctctgtgggacaaggggaaaccaccaaacccgatgtgatcttgaggttggaacaaggaaaggagccatggttggaggaagaggaagtgctgggaagtggccgtgcagaaaaaaatggggacattggagggcagatttggaagccaaaggatgtgaaagagagtctcggagggccgagctctggcgcacccccaccaagtggagggtctcctgccgggtccccaacatctactgaagaaggcaccagcgaatccgcaacgcccgagtcaggccctggtacctccacagaaccatctgaaggtagtgcgcctggttccccagctggaagccctacttccaccgaagaaggcacgtcaaccgaaccaagtgaaggatctgcccctgggaccagcactgaaccatctgagccaaaaaagaagagaaaggtaatggacaagaagtacagcatcggcctggccatcggcaccaactctgtgggctgggccgtgatcaccgacgagtacaaggtgcccagcaagaaattcaaggtgctgggcaacaccgaccggcacagcatcaagaagaacctgatcggcgccctgctgttcgacagcggagaaacagccgaggccacccggctgaagagaaccgccagaagaagatacaccagacggaagaaccggatctgctatctgcaagagatcttcagcaacgagatggccaaggtggacgacagcttcttccacagactggaagagtccttcctggtggaagaggataagaagcacgagcggcaccccatcttcggcaacatcgtggacgaggtggcctaccacgagaagtaccccaccatctaccacctgagaaagaaactggtggacagcaccgacaaggccgacctgcggctgatctatctggccctggcccacatgatcaagttccggggccacttcctgatcgagggcgacctgaaccccgacaacagcgacgtggacaagctgttcatccagctggtgcagacctacaaccagctgttcgaggaaaaccccatcaacgccagcggcgtggacgccaaggccatcctgtctgccagactgagcaagagcagacggctggaaaatctgatcgcccagctgcccggcgagaagaagaatggcctgttcggcaacctgattgccctgagcctgggcctgacccccaacttcaagagcaacttcgacctggccgaggatgccaaactgcagctgagcaaggacacctacgacgacgacctggacaacctgctggcccagatcggcgaccagtacgccgacctgtttctggccgccaagaacctgtccgacgccatcctgctgagcgacatcctgagagtgaacaccgagatcaccaaggcccccctgagcgcctctatgatcaagagatacgacgagcaccaccaggacctgaccctgctgaaagctctcgtgcggcagcagctgcctgagaagtacaaagagattttcttcgaccagagcaagaacggctacgccggctacatcgatggcggagccagccaggaagagttctacaagttcatcaagcccatcctggaaaagatggacggcaccgaggaactgctcgtgaagctgaacagagaggacctgctgcggaagcagcggaccttcgacaacggcagcatcccccaccagatccacctgggagagctgcacgccattctgcggcggcaggaagatttttacccattcctgaaggacaaccgggaaaagatcgagaagatcctgaccttccgcatcccctactacgtgggccctctggccaggggaaacagcagattcgcctggatgaccagaaagagcgaggaaaccatcaccccctggaacttcgaggaagtggtggacaagggcgccagcgcccagagcttcatcgagcggatgaccaacttcgataagaacctgcccaacgagaaggtgctgcccaagcacagcctgctgtacgagtacttcaccgtgtacaacgagctgaccaaagtgaaatacgtgaccgagggaatgagaaagcccgccttcctgagcggcgagcagaaaaaagccatcgtggacctgctgttcaagaccaaccggaaagtgaccgtgaagcagctgaaagaggactacttcaagaaaatcgagtgcttcgactccgtggaaatctccggcgtggaagatcggttcaacgcctccctgggcacataccacgatctgctgaaaattatcaaggacaaggacttcctggacaatgaggaaaacgaggacattctggaagatatcgtgctgaccctgacactgtttgaggacagagagatgatcgaggaacggctgaaaacctatgcccacctgttcgacgacaaagtgatgaagcagctgaagcggcggagatacaccggctggggcaggctgagccggaagctgatcaacggcatccgggacaagcagtccggcaagacaatcctggatttcctgaagtccgacggcttcgccaacagaaacttcatgcagctgatccacgacgacagcctgacctttaaagaggacatccagaaagcccaggtgtccggccagggcgatagcctgcacgagcacattgccaatctggccggcagccccgccattaagaagggcatcctgcagacagtgaaggtggtggacgagctcgtgaaagtgatgggccggcacaagcccgagaacatcgtgatcgaaatggccagagagaaccagaccacccagaagggacagaagaacagccgcgagagaatgaagcggatcgaagagggcatcaaagagctgggcagccagatcctgaaagaacaccccgtggaaaacacccagctgcagaacgagaagctgtacctgtactacctgcagaatgggcgggatatgtacgtggaccaggaactggacatcaaccggctgtccgactacgatgtggacgctatcgtgcctcagagctttctgaaggacgactccatcgataacaaagtgctgactcggagcgacaagaaccggggcaagagcgacaacgtgccctccgaagaggtcgtgaagaagatgaagaactactggcgccagctgctgaatgccaagctgattacccagaggaagttcgacaatctgaccaaggccgagagaggcggcctgagcgaactggataaggccggcttcatcaagagacagctggtggaaacccggcagatcacaaagcacgtggcacagatcctggactcccggatgaacactaagtacgacgagaacgacaaactgatccgggaagtgaaagtgatcaccctgaagtccaagctggtgtccgatttccggaaggatttccagttttacaaagtgcgcgagatcaacaactaccaccacgcccacgacgcctacctgaacgccgtcgtgggaaccgccctgatcaaaaagtaccctaagctggaaagcgagttcgtgtacggcgactacaaggtgtacgacgtgcggaagatgatcgccaagagcgagcaggaaatcggcaaggctaccgccaagtacttcttctacagcaacatcatgaactttttcaagaccgagattaccctggccaacggcgagatccggaagcggcctctgatcgagacaaacggcgaaacaggcgagatcgtgtgggataagggccgggactttgccaccgtgcggaaagtgctgtctatgccccaagtgaatatcgtgaaaaagaccgaggtgcagacaggcggcttcagcaaagagtctatcctgcccaagaggaacagcgacaagctgatcgccagaaagaaggactgggaccctaagaagtacggcggcttcgacagccccaccgtggcctattctgtgctggtggtggccaaagtggaaaagggcaagtccaagaaactgaagagtgtgaaagagctgctggggatcaccatcatggaaagaagcagcttcgagaagaatcccatcgactttctggaagccaagggctacaaagaagtgaaaaaggacctgatcatcaagctgcctaagtactccctgttcgagctggaaaacggccggaagagaatgctggcctctgccggcgaactgcagaagggaaacgaactggccctgccctccaaatatgtgaacttcctgtacctggccagccactatgagaagctgaagggctcccccgaggataatgagcagaaacagctgtttgtggaacagcacaaacactacctggacgagatcatcgagcagatcagcgagttctccaagagagtgatcctggccgacgctaatctggacaaggtgctgagcgcctacaacaagcacagagacaagcctatcagagagcaggccgagaatatcatccacctgtttaccctgaccaatctgggagcccctgccgccttcaagtactttgacaccaccatcgaccggaagaggtacaccagcaccaaagaggtgctggacgccaccctgatccaccagagcatcaccggcctgtacgagacacggatcgacctgtctcagctgggaggcgacgcctatccctatgacgtgcccgattatgccagcctgggcagcggctcccccaagaaaaaacgcaaggtggaagatcctaagaaaaagcggaaagtg

SEQ ID NO: 346 - DNA, 6477 bp, synthetic construct
  misc_feature 1..6477: note = V8' DNA
  source 1..6477: mol_type = other DNA
atgcctgctgctaagagagtgaaactggatggatccatgaacaattcccagggaagagtgaccttcgaggatgtcactgtgaacttcacccagggggagtggcagcggctgaatcccgaacagagaaacttgtacagggatgtgatgctggagaattacagcaaccttgtctctgtgggacaaggggaaaccaccaaacccgatgtgatcttgaggttggaacaaggaaaggagccatggttggaggaagaggaagtgctgggaagtggccgtgcagaaaaaaatggggacattggagggcagatttggaagccaaaggatgtgaaagagagtctcagcggcagcgagacccccggtaccagcgagagcgccacccccgagagcatgaaccatgaccaggaatttgaccccccaaaggtttacccacctgtgccagctgagaagaggaagcccatccgcgtgctgtctctctttgatgggattgctacagggctcctggtgctgaaggacctgggcatccaagtggaccgctacattgcctccgaggtgtgtgaggactccatcacggtgggcatggtgcggcaccagggaaagatcatgtacgtcggggacgtccgcagcgtcacacagaagcatatccaggagtggggcccattcgacctggtgattggaggcagtccctgcaatgacctctccattgtcaaccctgcccgcaagggactttatgagggtactggccgcctcttctttgagttctaccgcctcctgcatgatgcgcggcccaaggagggagatgatcgccccttcttctggctctttgagaatgtggtggccatgggcgttagtgacaagagggacatctcgcgatttcttgagtctaaccccgtgatgattgacgccaaagaagtgtctgctgcacacagggcccgttacttctggggtaaccttcctggcatgaacaggcctttggcatccactgtgaatgataagctggagctgcaagagtgtctggagcacggcagaatagccaagttcagcaaagtgaggaccattaccaccaggtcaaactctataaagcagggcaaagaccagcatttccccgtcttcatgaacgagaaggaggacatcctgtggtgcactgaaatggaaagggtgtttggcttccccgtccactacacagacgtctccaacatgagccgcttggcgaggcagagactgctgggccgatcgtggagcgtgccggtcatccgccacctcttcgctccgctgaaggaatattttgcttgtgtgtctagcggcaatagtaacgctaacagccgcgggccgagcttcagcagcggcctggtgccgttaagcttgcgcggcagccatatgggccctatggagatatacaagacagtgtctgcatggaagagacagccagtgcgggtactgagcctcttcagaaacatcgacaaggtactaaagagtttgggcttcttggaaagcggttctggttctgggggaggaacgctgaagtacgtggaagatgtcacaaatgtcgtgaggagagacgtggagaaatggggcccctttgacctggtgtacggctcgacgcagcccctaggcagctcttgtgatcgctgtcccggctggtacatgttccagttccaccggatcctgcagtatgcgctgcctcgccaggagagtcagcggcccttcttctggatattcatggacaatctgctgctgactgaggatgaccaagagacaactacccgcttccttcagacagaggctgtgaccctccaggatgtccgtggcagagactaccagaatgctatgcgggtgtggagcaacattccagggctgaagagcaagcatgcgcccctgaccccaaaggaagaagagtatctgcaagcccaagtcagaagcaggagcaagctggacgccccgaaagttgacctcctggtgaagaactgccttctcccgctgagagagtacttcaagtatttttctcaaaactcacttcctcttggagggccgagctctggcgcacccccaccaagtggagggtctcctgccgggtccccaacatctactgaagaaggcaccagcgaatccgcaacgcccgagtcaggccctggtacctccacagaaccatctgaaggtagtgcgcctggttccccagctggaagccctacttccaccgaagaaggcacgtcaaccgaaccaagtgaaggatctgcccctgggaccagcactgaaccatctgagccaaaaaagaagagaaaggtaatggacaagaagtacagcatcggcctggccatcggcaccaactctgtgggctgggccgtgatcaccgacgagtacaaggtgcccagcaagaaattcaaggtgctgggcaacaccgaccggcacagcatcaagaagaacctgatcggcgccctgctgttcgacagcggagaaacagccgaggccacccggctgaagagaaccgccagaagaagatacaccagacggaagaaccggatctgctatctgcaagagatcttcagcaacgagatggccaaggtggacgacagcttcttccacagactggaagagtccttcctggtggaagaggataagaagcacgagcggcaccccatcttcggcaacatcgtggacgaggtggcctaccacgagaagtaccccaccatctaccacctgagaaagaaactggtggacagcaccgacaaggccgacctgcggctgatctatctggccctggcccacatgatcaagttccggggccacttcctgatcgagggcgacctgaaccccgacaacagcgacgtggacaagctgttcatccagctggtgcagacctacaaccagctgttcgaggaaaaccccatcaacgccagcggcgtggacgccaaggccatcctgtctgccagactgagcaagagcagacggctggaaaatctgatcgcccagctgcccggcgagaagaagaatggcctgttcggcaacctgattgccctgagcctgggcctgacccccaacttcaagagcaacttcgacctggccgaggatgccaaactgcagctgagcaaggacacctacgacgacgacctggacaacctgctggcccagatcggcgaccagtacgccgacctgtttctggccgccaagaacctgtccgacgccatcctgctgagcgacatcctgagagtgaacaccgagatcaccaaggcccccctgagcgcctctatgatcaagagatacgacgagcaccaccaggacctgaccctgctgaaagctctcgtgcggcagcagctgcctgagaagtacaaagagattttcttcgaccagagcaagaacggctacgccggctacatcgatggcggagccagccaggaagagttctacaagttcatcaagcccatcctggaaaagatggacggcaccgaggaactgctcgtgaagctgaacagagaggacctgctgcggaagcagcggaccttcgacaacggcagcatcccccaccagatccacctgggagagctgcacgccattctgcggcggcaggaagatttttacccattcctgaaggacaaccgggaaaagatcgagaagatcctgaccttccgcatcccctactacgtgggccctctggccaggggaaacagcagattcgcctggatgaccagaaagagcgaggaaaccatcaccccctggaacttcgaggaagtggtggacaagggcgccagcgcccagagcttcatcgagcggatgaccaacttcgataagaacctgcccaacgagaaggtgctgcccaagcacagcctgctgtacgagtacttcaccgtgtacaacgagctgaccaaagtgaaatacgtgaccgagggaatgagaaagcccgccttcctgagcggcgagcagaaaaaagccatcgtggacctgctgttcaagaccaaccggaaagtgaccgtgaagcagctgaaagaggactacttcaagaaaatcgagtgcttcgactccgtggaaatctccggcgtggaagatcggttcaacgcctccctgggcacataccacgatctgctgaaaattatcaaggacaaggacttcctggacaatgaggaaaacgaggacattctggaagatatcgtgctgaccctgacactgtttgaggacagagagatgatcgaggaacggctgaaaacctatgcccacctgttcgacgacaaagtgatgaagcagctgaagcggcggagatacaccggctggggcaggctgagccggaagctgatcaacggcatccgggacaagcagtccggcaagacaatcctggatttcctgaagtccgacggcttcgccaacagaaacttcatgcagctgatccacgacgacagcctgacctttaaagaggacatccagaaagcccaggtgtccggccagggcgatagcctgcacgagcacattgccaatctggccggcagccccgccattaagaagggcatcctgcagacagtgaaggtggtggacgagctcgtgaaagtgatgggccggcacaagcccgagaacatcgtgatcgaaatggccagagagaaccagaccacccagaagggacagaagaacagccgcgagagaatgaagcggatcgaagagggcatcaaagagctgggcagccagatcctgaaagaacaccccgtggaaaacacccagctgcagaacgagaagctgtacctgtactacctgcagaatgggcgggatatgtacgtggaccaggaactggacatcaaccggctgtccgactacgatgtggacgctatcgtgcctcagagctttctgaaggacgactccatcgataacaaagtgctgactcggagcgacaagaaccggggcaagagcgacaacgtgccctccgaagaggtcgtgaagaagatgaagaactactggcgccagctgctgaatgccaagctgattacccagaggaagttcgacaatctgaccaaggccgagagaggcggcctgagcgaactggataaggccggcttcatcaagagacagctggtggaaacccggcagatcacaaagcacgtggcacagatcctggactcccggatgaacactaagtacgacgagaacgacaaactgatccgggaagtgaaagtgatcaccctgaagtccaagctggtgtccgatttccggaaggatttccagttttacaaagtgcgcgagatcaacaactaccaccacgcccacgacgcctacctgaacgccgtcgtgggaaccgccctgatcaaaaagtaccctaagctggaaagcgagttcgtgtacggcgactacaaggtgtacgacgtgcggaagatgatcgccaagagcgagcaggaaatcggcaaggctaccgccaagtacttcttctacagcaacatcatgaactttttcaagaccgagattaccctggccaacggcgagatccggaagcggcctctgatcgagacaaacggcgaaacaggcgagatcgtgtgggataagggccgggactttgccaccgtgcggaaagtgctgtctatgccccaagtgaatatcgtgaaaaagaccgaggtgcagacaggcggcttcagcaaagagtctatcctgcccaagaggaacagcgacaagctgatcgccagaaagaaggactgggaccctaagaagtacggcggcttcgacagccccaccgtggcctattctgtgctggtggtggccaaagtggaaaagggcaagtccaagaaactgaagagtgtgaaagagctgctggggatcaccatcatggaaagaagcagcttcgagaagaatcccatcgactttctggaagccaagggctacaaagaagtgaaaaaggacctgatcatcaagctgcctaagtactccctgttcgagctggaaaacggccggaagagaatgctggcctctgccggcgaactgcagaagggaaacgaactggccctgccctccaaatatgtgaacttcctgtacctggccagccactatgagaagctgaagggctcccccgaggataatgagcagaaacagctgtttgtggaacagcacaaacactacctggacgagatcatcgagcagatcagcgagttctccaagagagtgatcctggccgacgctaatctggacaaggtgctgagcgcctacaacaagcacagagacaagcctatcagagagcaggccgagaatatcatccacctgtttaccctgaccaatctgggagcccctgccgccttcaagtactttgacaccaccatcgaccggaagaggtacaccagcaccaaagaggtgctggacgccaccctgatccaccagagcatcaccggcctgtacgagacacggatcgacctgtctcagctgggaggcgacgcctatccctatgacgtgcccgattatgccagcctgggcagcggctcccccaagaaaaaacgcaaggtggaagatcctaagaaaaagcggaaagtg

SEQ ID NO: 347 - DNA, 6468 bp, synthetic construct
  misc_feature 1..6468: note = V9' DNA
  source 1..6468: mol_type = other DNA
atgcctgctgctaagagagtgaaactggatggatccatggacaagaagtacagcatcggcctggccatcggcaccaactctgtgggctgggccgtgatcaccgacgagtacaaggtgcccagcaagaaattcaaggtgctgggcaacaccgaccggcacagcatcaagaagaacctgatcggcgccctgctgttcgacagcggagaaacagccgaggccacccggctgaagagaaccgccagaagaagatacaccagacggaagaaccggatctgctatctgcaagagatcttcagcaacgagatggccaaggtggacgacagcttcttccacagactggaagagtccttcctggtggaagaggataagaagcacgagcggcaccccatcttcggcaacatcgtggacgaggtggcctaccacgagaagtaccccaccatctaccacctgagaaagaaactggtggacagcaccgacaaggccgacctgcggctgatctatctggccctggcccacatgatcaagttccggggccacttcctgatcgagggcgacctgaaccccgacaacagcgacgtggacaagctgttcatccagctggtgcagacctacaaccagctgttcgaggaaaaccccatcaacgccagcggcgtggacgccaaggccatcctgtctgccagactgagcaagagcagacggctggaaaatctgatcgcccagctgcccggcgagaagaagaatggcctgttcggcaacctgattgccctgagcctgggcctgacccccaacttcaagagcaacttcgacctggccgaggatgccaaactgcagctgagcaaggacacctacgacgacgacctggacaacctgctggcccagatcggcgaccagtacgccgacctgtttctggccgccaagaacctgtccgacgccatcctgctgagcgacatcctgagagtgaacaccgagatcaccaaggcccccctgagcgcctctatgatcaagagatacgacgagcaccaccaggacctgaccctgctgaaagctctcgtgcggcagcagctgcctgagaagtacaaagagattttcttcgaccagagcaagaacggctacgccggctacatcgatggcggagccagccaggaagagttctacaagttcatcaagcccatcctggaaaagatggacggcaccgaggaactgctcgtgaagctgaacagagaggacctgctgcggaagcagcggaccttcgacaacggcagcatcccccaccagatccacctgggagagctgcacgccattctgcggcggcaggaagatttttacccattcctgaaggacaaccgggaaaagatcgagaagatcctgaccttccgcatcccctactacgtgggccctctggccaggggaaacagcagattcgcctggatgaccagaaagagcgaggaaaccatcaccccctggaacttcgaggaagtggtggacaagggcgccagcgcccagagcttcatcgagcggatgaccaacttcgataagaacctgcccaacgagaaggtgctgcccaagcacagcctgctgtacgagtacttcaccgtgtacaacgagctgaccaaagtgaaatacgtgaccgagggaatgagaaagcccgccttcctgagcggcgagcagaaaaaagccatcgtggacctgctgttcaagaccaaccggaaagtgaccgtgaagcagctgaaagaggactacttcaagaaaatcgagtgcttcgactccgtggaaatctccggcgtggaagatcggttcaacgcctccctgggcacataccacgatctgctgaaaattatcaaggacaaggacttcctggacaatgaggaaaacgaggacattctggaagatatcgtgctgaccctgacactgtttgaggacagagagatgatcgaggaacggctgaaaacctatgcccacctgttcgacgacaaagtgatgaagcagctgaagcggcggagatacaccggctggggcaggctgagccggaagctgatcaacggcatccgggacaagcagtccggcaagacaatcctggatttcctgaagtccgacggcttcgccaacagaaacttcatgcagctgatccacgacgacagcctgacctttaaagaggacatccagaaagcccaggtgtccggccagggcgatagcctgcacgagcacattgccaatctggccggcagccccgccattaagaagggcatcctgcagacagtgaaggtggtggacgagctcgtgaaagtgatgggccggcacaagcccgagaacatcgtgatcgaaatggccagagagaaccagaccacccagaagggacagaagaacagccgcgagagaatgaagcggatcgaagagggcatcaaagagctgggcagccagatcctgaaagaacaccccgtggaaaacacccagctgcagaacgagaagctgtacctgtactacctgcagaatgggcgggatatgtacgtggaccaggaactggacatcaaccggctgtccgactacgatgtggacgctatcgtgcctcagagctttctgaaggacgactccatcgataacaaagtgctgactcggagcgacaagaaccggggcaagagcgacaacgtgccctccgaagaggtcgtgaagaagatgaagaactactggcgccagctgctgaatgccaagctgattacccagaggaagttcgacaatctgaccaaggccgagagaggcggcctgagcgaactggataaggccggcttcatcaagagacagctggtggaaacccggcagatcacaaagcacgtggcacagatcctggactcccggatgaacactaagtacgacgagaacgacaaactgatccgggaagtgaaagtgatcaccctgaagtccaagctggtgtccgatttccggaaggatttccagttttacaaagtgcgcgagatcaacaactaccaccacgcccacgacgcctacctgaacgccgtcgtgggaaccgccctgatcaaaaagtaccctaagctggaaagcgagttcgtgtacggcgactacaaggtgtacgacgtgcggaagatgatcgccaagagcgagcaggaaatcggcaaggctaccgccaagtacttcttctacagcaacatcatgaactttttcaagaccgagattaccctggccaacggcgagatccggaagcggcctctgatcgagacaaacggcgaaacaggcgagatcgtgtgggataagggccgggactttgccaccgtgcggaaagtgctgtctatgccccaagtgaatatcgtgaaaaagaccgaggtgcagacaggcggcttcagcaaagagtctatcctgcccaagaggaacagcgacaagctgatcgccagaaagaaggactgggaccctaagaagtacggcggcttcgacagccccaccgtggcctattctgtgctggtggtggccaaagtggaaaagggcaagtccaagaaactgaagagtgtgaaagagctgctggggatcaccatcatggaaagaagcagcttcgagaagaatcccatcgactttctggaagccaagggctacaaagaagtgaaaaaggacctgatcatcaagctgcctaagtactccctgttcgagctggaaaacggccggaagagaatgctggcctctgccggcgaactgcagaagggaaacgaactggccctgccctccaaatatgtgaacttcctgtacctggccagccactatgagaagctgaagggctcccccgaggataatgagcagaaacagctgtttgtggaacagcacaaacactacctggacgagatcatcgagcagatcagcgagttctccaagagagtgatcctggccgacgctaatctggacaaggtgctgagcgcctacaacaagcacagagacaagcctatcagagagcaggccgagaatatcatccacctgtttaccctgaccaatctgggagcccctgccgccttcaagtactttgacaccaccatcgaccggaagaggtacaccagcaccaaagaggtgctggacgccaccctgatccaccagagcatcaccggcctgtacgagacacggatcgacctgtctcagctgggaggcgacgcctatccctatgacgtgcccgattatgccagcctgggcagcggctcccccaagaaaaaacgcaaggtggaagatcctaagaaaaagcggaaagtggacggcggagggccgagctctggcgcacccccaccaagtggagggtctcctgccgggtccccaacatctactgaagaaggcaccagcgaatccgcaacgcccgagtcaggccctggtacctccacagaaccatctgaaggtagtgcgcctggttccccagctggaagccctacttccaccgaagaaggcacgtcaaccgaaccaagtgaaggatctgcccctgggaccagcactgaaccatctgagatgaaccatgaccaggaatttgaccccccaaaggtttacccacctgtgccagctgagaagaggaagcccatccgcgtgctgtctctctttgatgggattgctacagggctcctggtgctgaaggacctgggcatccaagtggaccgctacattgcctccgaggtgtgtgaggactccatcacggtgggcatggtgcggcaccagggaaagatcatgtacgtcggggacgtccgcagcgtcacacagaagcatatccaggagtggggcccattcgacctggtgattggaggcagtccctgcaatgacctctccattgtcaaccctgcccgcaagggactttatgagggtactggccgcctcttctttgagttctaccgcctcctgcatgatgcgcggcccaaggagggagatgatcgccccttcttctggctctttgagaatgtggtggccatgggcgttagtgacaagagggacatctcgcgatttcttgagtctaaccccgtgatgattgacgccaaagaagtgtctgctgcacacagggcccgttacttctggggtaaccttcctggcatgaacaggcctttggcatccactgtgaatgataagctggagctgcaagagtgtctggagcacggcagaatagccaagttcagcaaagtgaggaccattaccaccaggtcaaactctataaagcagggcaaagaccagcatttccccgtcttcatgaacgagaaggaggacatcctgtggtgcactgaaatggaaagggtgtttggcttccccgtccactacacagacgtctccaacatgagccgcttggcgaggcagagactgctgggccgatcgtggagcgtgccggtcatccgccacctcttcgctccgctgaaggaatattttgcttgtgtgtctagcggcaatagtaacgctaacagccgcgggccgagcttcagcagcggcctggtgccgttaagcttgcgcggcagccatatgggccctatggagatatacaagacagtgtctgcatggaagagacagccagtgcgggtactgagcctcttcagaaacatcgacaaggtactaaagagtttgggcttcttggaaagcggttctggttctgggggaggaacgctgaagtacgtggaagatgtcacaaatgtcgtgaggagagacgtggagaaatggggcccctttgacctggtgtacggctcgacgcagcccctaggcagctcttgtgatcgctgtcccggctggtacatgttccagttccaccggatcctgcagtatgcgctgcctcgccaggagagtcagcggcccttcttctggatattcatggacaatctgctgctgactgaggatgaccaagagacaactacccgcttccttcagacagaggctgtgaccctccaggatgtccgtggcagagactaccagaatgctatgcgggtgtggagcaacattccagggctgaagagcaagcatgcgcccctgaccccaaaggaagaagagtatctgcaagcccaagtcagaagcaggagcaagctggacgccccgaaagttgacctcctggtgaagaactgccttctcccgctgagagagtacttcaagtatttttctcaaaactcacttcctcttgacggcagcggcagcgagacccccggtaccagcgagagcgccacccccgagagcatgaacaattcccagggaagagtgaccttcgaggatgtcactgtgaacttcacccagggggagtggcagcggctgaatcccgaacagagaaacttgtacagggatgtgatgctggagaattacagcaaccttgtctctgtgggacaaggggaaaccaccaaacccgatgtgatcttgaggttggaacaaggaaaggagccatggttggaggaagaggaagtgctgggaagtggccgtgcagaaaaaaatggggacattggagggcagatttggaagccaaaggatgtgaaagagagtctc

SEQ ID NO: 348 - DNA, 6462 bp, synthetic construct
  misc_feature 1..6462: note = V10' DNA
  source 1..6462: mol_type = other DNA
atgcctgctgctaagagagtgaaactggatggatccatggacaagaagtacagcatcggcctggccatcggcaccaactctgtgggctgggccgtgatcaccgacgagtacaaggtgcccagcaagaaattcaaggtgctgggcaacaccgaccggcacagcatcaagaagaacctgatcggcgccctgctgttcgacagcggagaaacagccgaggccacccggctgaagagaaccgccagaagaagatacaccagacggaagaaccggatctgctatctgcaagagatcttcagcaacgagatggccaaggtggacgacagcttcttccacagactggaagagtccttcctggtggaagaggataagaagcacgagcggcaccccatcttcggcaacatcgtggacgaggtggcctaccacgagaagtaccccaccatctaccacctgagaaagaaactggtggacagcaccgacaaggccgacctgcggctgatctatctggccctggcccacatgatcaagttccggggccacttcctgatcgagggcgacctgaaccccgacaacagcgacgtggacaagctgttcatccagctggtgcagacctacaaccagctgttcgaggaaaaccccatcaacgccagcggcgtggacgccaaggccatcctgtctgccagactgagcaagagcagacggctggaaaatctgatcgcccagctgcccggcgagaagaagaatggcctgttcggcaacctgattgccctgagcctgggcctgacccccaacttcaagagcaacttcgacctggccgaggatgccaaactgcagctgagcaaggacacctacgacgacgacctggacaacctgctggcccagatcggcgaccagtacgccgacctgtttctggccgccaagaacctgtccgacgccatcctgctgagcgacatcctgagagtgaacaccgagatcaccaaggcccccctgagcgcctctatgatcaagagatacgacgagcaccaccaggacctgaccctgctgaaagctctcgtgcggcagcagctgcctgagaagtacaaagagattttcttcgaccagagcaagaacggctacgccggctacatcgatggcggagccagccaggaagagttctacaagttcatcaagcccatcctggaaaagatggacggcaccgaggaactgctcgtgaagctgaacagagaggacctgctgcggaagcagcggaccttcgacaacggcagcatcccccaccagatccacctgggagagctgcacgccattctgcggcggcaggaagatttttacccattcctgaaggacaaccgggaaaagatcgagaagatcctgaccttccgcatcccctactacgtgggccctctggccaggggaaacagcagattcgcctggatgaccagaaagagcgaggaaaccatcaccccctggaacttcgaggaagtggtggacaagggcgccagcgcccagagcttcatcgagcggatgaccaacttcgataagaacctgcccaacgagaaggtgctgcccaagcacagcctgctgtacgagtacttcaccgtgtacaacgagctgaccaaagtgaaatacgtgaccgagggaatgagaaagcccgccttcctgagcggcgagcagaaaaaagccatcgtggacctgctgttcaagaccaaccggaaagtgaccgtgaagcagctgaaagaggactacttcaagaaaatcgagtgcttcgactccgtggaaatctccggcgtggaagatcggttcaacgcctccctgggcacataccacgatctgctgaaaattatcaaggacaaggacttcctggacaatgaggaaaacgaggacattctggaagatatcgtgctgaccctgacactgtttgaggacagagagatgatcgaggaacggctgaaaacctatgcccacctgttcgacgacaaagtgatgaagcagctgaagcggcggagatacaccggctggggcaggctgagccggaagctgatcaacggcatccgggacaagcagtccggcaagacaatcctggatttcctgaagtccgacggcttcgccaacagaaacttcatgcagctgatccacgacgacagcctgacctttaaagaggacatccagaaagcccaggtgtccggccagggcgatagcctgcacgagcacattgccaatctggccggcagccccgccattaagaagggcatcctgcagacagtgaaggtggtggacgagctcgtgaaagtgatgggccggcacaagcccgagaacatcgtgatcgaaatggccagagagaaccagaccacccagaagggacagaagaacagccgcgagagaatgaagcggatcgaagagggcatcaaagagctgggcagccagatcctgaaagaacaccccgtggaaaacacccagctgcagaacgagaagctgtacctgtactacctgcagaatgggcgggatatgtacgtggaccaggaactggacatcaaccggctgtccgactacgatgtggacgctatcgtgcctcagagctttctgaaggacgactccatcgataacaaagtgctgactcggagcgacaagaaccggggcaagagcgacaacgtgccctccgaagaggtcgtgaagaagatgaagaactactggcgccagctgctgaatgccaagctgattacccagaggaagttcgacaatctgaccaaggccgagagaggcggcctgagcgaactggataaggccggcttcatcaagagacagctggtggaaacccggcagatcacaaagcacgtggcacagatcctggactcccggatgaacactaagtacgacgagaacgacaaactgatccgggaagtgaaagtgatcaccctgaagtccaagctggtgtccgatttccggaaggatttccagttttacaaagtgcgcgagatcaacaactaccaccacgcccacgacgcctacctgaacgccgtcgtgggaaccgccctgatcaaaaagtaccctaagctggaaagcgagttcgtgtacggcgactacaaggtgtacgacgtgcggaagatgatcgccaagagcgagcaggaaatcggcaaggctaccgccaagtacttcttctacagcaacatcatgaactttttcaagaccgagattaccctggccaacggcgagatccggaagcggcctctgatcgagacaaacggcgaaacaggcgagatcgtgtgggataagggccgggactttgccaccgtgcggaaagtgctgtctatgccccaagtgaatatcgtgaaaaagaccgaggtgcagacaggcggcttcagcaaagagtctatcctgcccaagaggaacagcgacaagctgatcgccagaaagaaggactgggaccctaagaagtacggcggcttcgacagccccaccgtggcctattctgtgctggtggtggccaaagtggaaaagggcaagtccaagaaactgaagagtgtgaaagagctgctggggatcaccatcatggaaagaagcagcttcgagaagaatcccatcgactttctggaagccaagggctacaaagaagtgaaaaaggacctgatcatcaagctgcctaagtactccctgttcgagctggaaaacggccggaagagaatgctggcctctgccggcgaactgcagaagggaaacgaactggccctgccctccaaatatgtgaacttcctgtacctggccagccactatgagaagctgaagggctcccccgaggataatgagcagaaacagctgtttgtggaacagcacaaacactacctggacgagatcatcgagcagatcagcgagttctccaagagagtgatcctggccgacgctaatctggacaaggtgctgagcgcctacaacaagcacagagacaagcctatcagagagcaggccgagaatatcatccacctgtttaccctgaccaatctgggagcccctgccgccttcaagtactttgacaccaccatcgaccggaagaggtacaccagcaccaaagaggtgctggacgccaccctgatccaccagagcatcaccggcctgtacgagacacggatcgacctgtctcagctgggaggcgacgcctatccctatgacgtgcccgattatgccagcctgggcagcggctcccccaagaaaaaacgcaaggtggaagatcctaagaaaaagcggaaagtggacggcggagggccgagctctggcgcacccccaccaagtggagggtctcctgccgggtccccaacatctactgaagaaggcaccagcgaatccgcaacgcccgagtcaggccctggtacctccacagaaccatctgaaggtagtgcgcctggttccccagctggaagccctacttccaccgaagaaggcacgtcaaccgaaccaagtgaaggatctgcccctgggaccagcactgaaccatctgagatgaacaattcccagggaagagtgaccttcgaggacgtgaccgtgaacttcacccaaggcgagtggcagagactgaaccccgagcagagaaacctgtaccgggacgtgatgctggaaaactacagcaacctggtgtccgtcggccagggcgagacaacaaagcctgacgtgatcctgcggctggaacagggcaaagagccttggctggaagaggaagaggtgctcggatctggcagagccgagaagaatggcgatatcggcggacagatctggaagccaaaggatgtgaaagagagtctcagcggcagcgagacccccggtaccagcgagagcgccacccccgagagcatgaaccatgaccaggaatttgaccccccaaaggtttacccacctgtgccagctgagaagaggaagcccatccgcgtgctgtctctctttgatgggattgctacagggctcctggtgctgaaggacctgggcatccaagtggaccgctacattgcctccgaggtgtgtgaggactccatcacggtgggcatggtgcggcaccagggaaagatcatgtacgtcggggacgtccgcagcgtcacacagaagcatatccaggagtggggcccattcgacctggtgattggaggcagtccctgcaatgacctctccattgtcaaccctgcccgcaagggactttatgagggtactggccgcctcttctttgagttctaccgcctcctgcatgatgcgcggcccaaggagggagatgatcgccccttcttctggctctttgagaatgtggtggccatgggcgttagtgacaagagggacatctcgcgatttcttgagtctaaccccgtgatgattgacgccaaagaagtgtctgctgcacacagggcccgttacttctggggtaaccttcctggcatgaacaggcctttggcatccactgtgaatgataagctggagctgcaagagtgtctggagcacggcagaatagccaagttcagcaaagtgaggaccattaccaccaggtcaaactctataaagcagggcaaagaccagcatttccccgtcttcatgaacgagaaggaggacatcctgtggtgcactgaaatggaaagggtgtttggcttccccgtccactacacagacgtctccaacatgagccgcttggcgaggcagagactgctgggccgatcgtggagcgtgccggtcatccgccacctcttcgctccgctgaaggaatattttgcttgtgtgtctagcggcaatagtaacgctaacagccgcgggccgagcttcagcagcggcctggtgccgttaagcttgcgcggcagccatatgggccctatggagatatacaagacagtgtctgcatggaagagacagccagtgcgggtactgagcctcttcagaaacatcgacaaggtactaaagagtttgggcttcttggaaagcggttctggttctgggggaggaacgctgaagtacgtggaagatgtcacaaatgtcgtgaggagagacgtggagaaatggggcccctttgacctggtgtacggctcgacgcagcccctaggcagctcttgtgatcgctgtcccggctggtacatgttccagttccaccggatcctgcagtatgcgctgcctcgccaggagagtcagcggcccttcttctggatattcatggacaatctgctgctgactgaggatgaccaagagacaactacccgcttccttcagacagaggctgtgaccctccaggatgtccgtggcagagactaccagaatgctatgcgggtgtggagcaacattccagggctgaagagcaagcatgcgcccctgaccccaaaggaagaagagtatctgcaagcccaagtcagaagcaggagcaagctggacgccccgaaagttgacctcctggtgaagaactgccttctcccgctgagagagtacttcaagtatttttctcaaaactcacttcctctt

SEQ ID NO: 349 - DNA, 6462 bp, synthetic construct
  misc_feature 1..6462: note = V11' DNA
  source 1..6462: mol_type = other DNA
atgcctgctgctaagagagtgaaactggatggatccatggacaagaagtacagcatcggcctggccatcggcaccaactctgtgggctgggccgtgatcaccgacgagtacaaggtgcccagcaagaaattcaaggtgctgggcaacaccgaccggcacagcatcaagaagaacctgatcggcgccctgctgttcgacagcggagaaacagccgaggccacccggctgaagagaaccgccagaagaagatacaccagacggaagaaccggatctgctatctgcaagagatcttcagcaacgagatggccaaggtggacgacagcttcttccacagactggaagagtccttcctggtggaagaggataagaagcacgagcggcaccccatcttcggcaacatcgtggacgaggtggcctaccacgagaagtaccccaccatctaccacctgagaaagaaactggtggacagcaccgacaaggccgacctgcggctgatctatctggccctggcccacatgatcaagttccggggccacttcctgatcgagggcgacctgaaccccgacaacagcgacgtggacaagctgttcatccagctggtgcagacctacaaccagctgttcgaggaaaaccccatcaacgccagcggcgtggacgccaaggccatcctgtctgccagactgagcaagagcagacggctggaaaatctgatcgcccagctgcccggcgagaagaagaatggcctgttcggcaacctgattgccctgagcctgggcctgacccccaacttcaagagcaacttcgacctggccgaggatgccaaactgcagctgagcaaggacacctacgacgacgacctggacaacctgctggcccagatcggcgaccagtacgccgacctgtttctggccgccaagaacctgtccgacgccatcctgctgagcgacatcctgagagtgaacaccgagatcaccaaggcccccctgagcgcctctatgatcaagagatacgacgagcaccaccaggacctgaccctgctgaaagctctcgtgcggcagcagctgcctgagaagtacaaagagattttcttcgaccagagcaagaacggctacgccggctacatcgatggcggagccagccaggaagagttctacaagttcatcaagcccatcctggaaaagatggacggcaccgaggaactgctcgtgaagctgaacagagaggacctgctgcggaagcagcggaccttcgacaacggcagcatcccccaccagatccacctgggagagctgcacgccattctgcggcggcaggaagatttttacccattcctgaaggacaaccgggaaaagatcgagaagatcctgaccttccgcatcccctactacgtgggccctctggccaggggaaacagcagattcgcctggatgaccagaaagagcgaggaaaccatcaccccctggaacttcgaggaagtggtggacaagggcgccagcgcccagagcttcatcgagcggatgaccaacttcgataagaacctgcccaacgagaaggtgctgcccaagcacagcctgctgtacgagtacttcaccgtgtacaacgagctgaccaaagtgaaatacgtgaccgagggaatgagaaagcccgccttcctgagcggcgagcagaaaaaagccatcgtggacctgctgttcaagaccaaccggaaagtgaccgtgaagcagctgaaagaggactacttcaagaaaatcgagtgcttcgactccgtggaaatctccggcgtggaagatcggttcaacgcctccctgggcacataccacgatctgctgaaaattatcaaggacaaggacttcctggacaatgaggaaaacgaggacattctggaagatatcgtgctgaccctgacactgtttgaggacagagagatgatcgaggaacggctgaaaacctatgcccacctgttcgacgacaaagtgatgaagcagctgaagcggcggagatacaccggctggggcaggctgagccggaagctgatcaacggcatccgggacaagcagtccggcaagacaatcctggatttcctgaagtccgacggcttcgccaacagaaacttcatgcagctgatccacgacgacagcctgacctttaaagaggacatccagaaagcccaggtgtccggccagggcgatagcctgcacgagcacattgccaatctggccggcagccccgccattaagaagggcatcctgcagacagtgaaggtggtggacgagctcgtgaaagtgatgggccggcacaagcccgagaacatcgtgatcgaaatggccagagagaaccagaccacccagaagggacagaagaacagccgcgagagaatgaagcggatcgaagagggcatcaaagagctgggcagccagatcctgaaagaacaccccgtggaaaacacccagctgcagaacgagaagctgtacctgtactacctgcagaatgggcgggatatgtacgtggaccaggaactggacatcaaccggctgtccgactacgatgtggacgctatcgtgcctcagagctttctgaaggacgactccatcgataacaaagtgctgactcggagcgacaagaaccggggcaagagcgacaacgtgccctccgaagaggtcgtgaagaagatgaagaactactggcgccagctgctgaatgccaagctgattacccagaggaagttcgacaatctgaccaaggccgagagaggcggcctgagcgaactggataaggccggcttcatcaagagacagctggtggaaacccggcagatcacaaagcacgtggcacagatcctggactcccggatgaacactaagtacgacgagaacgacaaactgatccgggaagtgaaagtgatcaccctgaagtccaagctggtgtccgatttccggaaggatttccagttttacaaagtgcgcgagatcaacaactaccaccacgcccacgacgcctacctgaacgccgtcgtgggaaccgccctgatcaaaaagtaccctaagctggaaagcgagttcgtgtacggcgactacaaggtgtacgacgtgcggaagatgatcgccaagagcgagcaggaaatcggcaaggctaccgccaagtacttcttctacagcaacatcatgaactttttcaagaccgagattaccctggccaacggcgagatccggaagcggcctctgatcgagacaaacggcgaaacaggcgagatcgtgtgggataagggccgggactttgccaccgtgcggaaagtgctgtctatgccccaagtgaatatcgtgaaaaagaccgaggtgcagacaggcggcttcagcaaagagtctatcctgcccaagaggaacagcgacaagctgatcgccagaaagaaggactgggaccctaagaagtacggcggcttcgacagccccaccgtggcctattctgtgctggtggtggccaaagtggaaaagggcaagtccaagaaactgaagagtgtgaaagagctgctggggatcaccatcatggaaagaagcagcttcgagaagaatcccatcgactttctggaagccaagggctacaaagaagtgaaaaaggacctgatcatcaagctgcctaagtactccctgttcgagctggaaaacggccggaagagaatgctggcctctgccggcgaactgcagaagggaaacgaactggccctgccctccaaatatgtgaacttcctgtacctggccagccactatgagaagctgaagggctcccccgaggataatgagcagaaacagctgtttgtggaacagcacaaacactacctggacgagatcatcgagcagatcagcgagttctccaagagagtgatcctggccgacgctaatctggacaaggtgctgagcgcctacaacaagcacagagacaagcctatcagagagcaggccgagaatatcatccacctgtttaccctgaccaatctgggagcccctgccgccttcaagtactttgacaccaccatcgaccggaagaggtacaccagcaccaaagaggtgctggacgccaccctgatccaccagagcatcaccggcctgtacgagacacggatcgacctgtctcagctgggaggcgacgcctatccctatgacgtgcccgattatgccagcctgggcagcggctcccccaagaaaaaacgcaaggtggaagatcctaagaaaaagcggaaagtggacggcggagggccgagctctggcgcacccccaccaagtggagggtctcctgccgggtccccaacatctactgaagaaggcaccagcgaatccgcaacgcccgagtcaggccctggtacctccacagaaccatctgaaggtagtgcgcctggttccccagctggaagccctacttccaccgaagaaggcacgtcaaccgaaccaagtgaaggatctgcccctgggaccagcactgaaccatctgagatgaacaattcccagggaagagtgaccttcgaggatgtcactgtgaacttcacccagggggagtggcagcggctgaatcccgaacagagaaacttgtacagggatgtgatgctggagaattacagcaaccttgtctctgtgggacaaggggaaaccaccaaacccgatgtgatcttgaggttggaacaaggaaaggagccatggttggaggaagaggaagtgctgggaagtggccgtgcagaaaaaaatggggacattggagggcagatttggaagccaaaggatgtgaaagagagtctcagcggcagcgagacccccggtaccagcgagagcgccacccccgagagcatgggccctatggagatatacaagacagtgtctgcatggaagagacagccagtgcgggtactgagcctcttcagaaacatcgacaaggtactaaagagtttgggcttcttggaaagcggttctggttctgggggaggaacgctgaagtacgtggaagatgtcacaaatgtcgtgaggagagacgtggagaaatggggcccctttgacctggtgtacggctcgacgcagcccctaggcagctcttgtgatcgctgtcccggctggtacatgttccagttccaccggatcctgcagtatgcgctgcctcgccaggagagtcagcggcccttcttctggatattcatggacaatctgctgctgactgaggatgaccaagagacaactacccgcttccttcagacagaggctgtgaccctccaggatgtccgtggcagagactaccagaatgctatgcgggtgtggagcaacattccagggctgaagagcaagcatgcgcccctgaccccaaaggaagaagagtatctgcaagcccaagtcagaagcaggagcaagctggacgccccgaaagttgacctcctggtgaagaactgccttctcccgctgagagagtacttcaagtatttttctcaaaactcacttcctctttctagcggcaatagtaacgctaacagccgcgggccgagcttcagcagcggcctggtgccgttaagcttgcgcggcagccatatgaaccatgaccaggaatttgaccccccaaaggtttacccacctgtgccagctgagaagaggaagcccatccgcgtgctgtctctctttgatgggattgctacagggctcctggtgctgaaggacctgggcatccaagtggaccgctacattgcctccgaggtgtgtgaggactccatcacggtgggcatggtgcggcaccagggaaagatcatgtacgtcggggacgtccgcagcgtcacacagaagcatatccaggagtggggcccattcgacctggtgattggaggcagtccctgcaatgacctctccattgtcaaccctgcccgcaagggactttatgagggtactggccgcctcttctttgagttctaccgcctcctgcatgatgcgcggcccaaggagggagatgatcgccccttcttctggctctttgagaatgtggtggccatgggcgttagtgacaagagggacatctcgcgatttcttgagtctaaccccgtgatgattgacgccaaagaagtgtctgctgcacacagggcccgttacttctggggtaaccttcctggcatgaacaggcctttggcatccactgtgaatgataagctggagctgcaagagtgtctggagcacggcagaatagccaagttcagcaaagtgaggaccattaccaccaggtcaaactctataaagcagggcaaagaccagcatttccccgtcttcatgaacgagaaggaggacatcctgtggtgcactgaaatggaaagggtgtttggcttccccgtccactacacagacgtctccaacatgagccgcttggcgaggcagagactgctgggccgatcgtggagcgtgccggtcatccgccacctcttcgctccgctgaaggaatattttgcttgtgtg

SEQ ID NO: 350 - DNA, 6702 bp, synthetic construct
  misc_feature 1..6702: note = V14' DNA
  source 1..6702: mol_type = other DNA
atgcctgctgctaagagagtgaaactggatggatccatggacaagaagtacagcatcggcctggccatcggcaccaactctgtgggctgggccgtgatcaccgacgagtacaaggtgcccagcaagaaattcaaggtgctgggcaacaccgaccggcacagcatcaagaagaacctgatcggcgccctgctgttcgacagcggagaaacagccgaggccacccggctgaagagaaccgccagaagaagatacaccagacggaagaaccggatctgctatctgcaagagatcttcagcaacgagatggccaaggtggacgacagcttcttccacagactggaagagtccttcctggtggaagaggataagaagcacgagcggcaccccatcttcggcaacatcgtggacgaggtggcctaccacgagaagtaccccaccatctaccacctgagaaagaaactggtggacagcaccgacaaggccgacctgcggctgatctatctggccctggcccacatgatcaagttccggggccacttcctgatcgagggcgacctgaaccccgacaacagcgacgtggacaagctgttcatccagctggtgcagacctacaaccagctgttcgaggaaaaccccatcaacgccagcggcgtggacgccaaggccatcctgtctgccagactgagcaagagcagacggctggaaaatctgatcgcccagctgcccggcgagaagaagaatggcctgttcggcaacctgattgccctgagcctgggcctgacccccaacttcaagagcaacttcgacctggccgaggatgccaaactgcagctgagcaaggacacctacgacgacgacctggacaacctgctggcccagatcggcgaccagtacgccgacctgtttctggccgccaagaacctgtccgacgccatcctgctgagcgacatcctgagagtgaacaccgagatcaccaaggcccccctgagcgcctctatgatcaagagatacgacgagcaccaccaggacctgaccctgctgaaagctctcgtgcggcagcagctgcctgagaagtacaaagagattttcttcgaccagagcaagaacggctacgccggctacatcgatggcggagccagccaggaagagttctacaagttcatcaagcccatcctggaaaagatggacggcaccgaggaactgctcgtgaagctgaacagagaggacctgctgcggaagcagcggaccttcgacaacggcagcatcccccaccagatccacctgggagagctgcacgccattctgcggcggcaggaagatttttacccattcctgaaggacaaccgggaaaagatcgagaagatcctgaccttccgcatcccctactacgtgggccctctggccaggggaaacagcagattcgcctggatgaccagaaagagcgaggaaaccatcaccccctggaacttcgaggaagtggtggacaagggcgccagcgcccagagcttcatcgagcggatgaccaacttcgataagaacctgcccaacgagaaggtgctgcccaagcacagcctgctgtacgagtacttcaccgtgtacaacgagctgaccaaagtgaaatacgtgaccgagggaatgagaaagcccgccttcctgagcggcgagcagaaaaaagccatcgtggacctgctgttcaagaccaaccggaaagtgaccgtgaagcagctgaaagaggactacttcaagaaaatcgagtgcttcgactccgtggaaatctccggcgtggaagatcggttcaacgcctccctgggcacataccacgatctgctgaaaattatcaaggacaaggacttcctggacaatgaggaaaacgaggacattctggaagatatcgtgctgaccctgacactgtttgaggacagagagatgatcgaggaacggctgaaaacctatgcccacctgttcgacgacaaagtgatgaagcagctgaagcggcggagatacaccggctggggcaggctgagccggaagctgatcaacggcatccgggacaagcagtccggcaagacaatcctggatttcctgaagtccgacggcttcgccaacagaaacttcatgcagctgatccacgacgacagcctgacctttaaagaggacatccagaaagcccaggtgtccggccagggcgatagcctgcacgagcacattgccaatctggccggcagccccgccattaagaagggcatcctgcagacagtgaaggtggtggacgagctcgtgaaagtgatgggccggcacaagcccgagaacatcgtgatcgaaatggccagagagaaccagaccacccagaagggacagaagaacagccgcgagagaatgaagcggatcgaagagggcatcaaagagctgggcagccagatcctgaaagaacaccccgtggaaaacacccagctgcagaacgagaagctgtacctgtactacctgcagaatgggcgggatatgtacgtggaccaggaactggacatcaaccggctgtccgactacgatgtggacgctatcgtgcctcagagctttctgaaggacgactccatcgataacaaagtgctgactcggagcgacaagaaccggggcaagagcgacaacgtgccctccgaagaggtcgtgaagaagatgaagaactactggcgccagctgctgaatgccaagctgattacccagaggaagttcgacaatctgaccaaggccgagagaggcggcctgagcgaactggataaggccggcttcatcaagagacagctggtggaaacccggcagatcacaaagcacgtggcacagatcctggactcccggatgaacactaagtacgacgagaacgacaaactgatccgggaagtgaaagtgatcaccctgaagtccaagctggtgtccgatttccggaaggatttccagttttacaaagtgcgcgagatcaacaactaccaccacgcccacgacgcctacctgaacgccgtcgtgggaaccgccctgatcaaaaagtaccctaagctggaaagcgagttcgtgtacggcgactacaaggtgtacgacgtgcggaagatgatcgccaagagcgagcaggaaatcggcaaggctaccgccaagtacttcttctacagcaacatcatgaactttttcaagaccgagattaccctggccaacggcgagatccggaagcggcctctgatcgagacaaacggcgaaacaggcgagatcgtgtgggataagggccgggactttgccaccgtgcggaaagtgctgtctatgccccaagtgaatatcgtgaaaaagaccgaggtgcagacaggcggcttcagcaaagagtctatcctgcccaagaggaacagcgacaagctgatcgccagaaagaaggactgggaccctaagaagtacggcggcttcgacagccccaccgtggcctattctgtgctggtggtggccaaagtggaaaagggcaagtccaagaaactgaagagtgtgaaagagctgctggggatcaccatcatggaaagaagcagcttcgagaagaatcccatcgactttctggaagccaagggctacaaagaagtgaaaaaggacctgatcatcaagctgcctaagtactccctgttcgagctggaaaacggccggaagagaatgctggcctctgccggcgaactgcagaagggaaacgaactggccctgccctccaaatatgtgaacttcctgtacctggccagccactatgagaagctgaagggctcccccgaggataatgagcagaaacagctgtttgtggaacagcacaaacactacctggacgagatcatcgagcagatcagcgagttctccaagagagtgatcctggccgacgctaatctggacaaggtgctgagcgcctacaacaagcacagagacaagcctatcagagagcaggccgagaatatcatccacctgtttaccctgaccaatctgggagcccctgccgccttcaagtactttgacaccaccatcgaccggaagaggtacaccagcaccaaagaggtgctggacgccaccctgatccaccagagcatcaccggcctgtacgagacacggatcgacctgtctcagctgggaggcgacgcctatccctatgacgtgcccgattatgccagcctgggcagcggctcccccaagaaaaaacgcaaggtggaagatcctaagaaaaagcggaaagtggacggcggagggccgagctctggcgcacccccaccaagtggagggtctcctgccgggtccccaacatctactgaagaaggcaccagcgaatccgcaacgcccgagtcaggccctggtacctccacagaaccatctgaaggtagtgcgcctggttccccagctggaagccctacttccaccgaagaaggcacgtcaaccgaaccaagtgaaggatctgcccctgggaccagcactgaaccatctgagatgaacaattcccagggaagagtgaccttcgaggacgtgaccgtgaacttcacccaaggcgagtggcagagactgaaccccgagcagagaaacctgtaccgggacgtgatgctggaaaactacagcaacctggtgtccgtcggccagggcgagacaacaaagcctgacgtgatcctgcggctggaacagggcaaagagccttggctggaagaggaagaggtgctcggatctggcagagccgagaagaatggcgatatcggcggacagatctggaagccaaaggatgtgaaagagagtctcagcggcagcgagacccccggtaccagcgagggcggccctagcagcggcgcccctccccctagcggcggcagccctgccggatcccctacaagcaccgaagaaggcacaagcgagtccgctacccctgagtccggccctggcacctccacagagcctagcgagggatccgctcctggatcccctgccggaagccctacctccaccgaggagggcacaagcaccgagccttccgagggcagcgcccccggaacaagcaccgaacctagcgagagcgccacccccgagagcatgggccctatggagatatacaagacagtgtctgcatggaagagacagccagtgcgggtactgagcctcttcagaaacatcgacaaggtactaaagagtttgggcttcttggaaagcggttctggttctgggggaggaacgctgaagtacgtggaagatgtcacaaatgtcgtgaggagagacgtggagaaatggggcccctttgacctggtgtacggctcgacgcagcccctaggcagctcttgtgatcgctgtcccggctggtacatgttccagttccaccggatcctgcagtatgcgctgcctcgccaggagagtcagcggcccttcttctggatattcatggacaatctgctgctgactgaggatgaccaagagacaactacccgcttccttcagacagaggctgtgaccctccaggatgtccgtggcagagactaccagaatgctatgcgggtgtggagcaacattccagggctgaagagcaagcatgcgcccctgaccccaaaggaagaagagtatctgcaagcccaagtcagaagcaggagcaagctggacgccccgaaagttgacctcctggtgaagaactgccttctcccgctgagagagtacttcaagtatttttctcaaaactcacttcctctttctagcggcaatagtaacgctaacagccgcgggccgagcttcagcagcggcctggtgccgttaagcttgcgcggcagccatatgaaccatgaccaggaatttgaccccccaaaggtttacccacctgtgccagctgagaagaggaagcccatccgcgtgctgtctctctttgatgggattgctacagggctcctggtgctgaaggacctgggcatccaagtggaccgctacattgcctccgaggtgtgtgaggactccatcacggtgggcatggtgcggcaccagggaaagatcatgtacgtcggggacgtccgcagcgtcacacagaagcatatccaggagtggggcccattcgacctggtgattggaggcagtccctgcaatgacctctccattgtcaaccctgcccgcaagggactttatgagggtactggccgcctcttctttgagttctaccgcctcctgcatgatgcgcggcccaaggagggagatgatcgccccttcttctggctctttgagaatgtggtggccatgggcgttagtgacaagagggacatctcgcgatttcttgagtctaaccccgtgatgattgacgccaaagaagtgtctgctgcacacagggcccgttacttctggggtaaccttcctggcatgaacaggcctttggcatccactgtgaatgataagctggagctgcaagagtgtctggagcacggcagaatagccaagttcagcaaagtgaggaccattaccaccaggtcaaactctataaagcagggcaaagaccagcatttccccgtcttcatgaacgagaaggaggacatcctgtggtgcactgaaatggaaagggtgtttggcttccccgtccactacacagacgtctccaacatgagccgcttggcgaggcagagactgctgggccgatcgtggagcgtgccggtcatccgccacctcttcgctccgctgaaggaatattttgcttgtgtg

SEQ ID NO: 351 - DNA, 6690 bp, synthetic construct
  misc_feature 1..6690: note = V15' DNA
  source 1..6690: mol_type = other DNA
atgcctgctgctaagagagtgaaactggatggatccatggacaagaagtacagcatcggcctggccatcggcaccaactctgtgggctgggccgtgatcaccgacgagtacaaggtgcccagcaagaaattcaaggtgctgggcaacaccgaccggcacagcatcaagaagaacctgatcggcgccctgctgttcgacagcggagaaacagccgaggccacccggctgaagagaaccgccagaagaagatacaccagacggaagaaccggatctgctatctgcaagagatcttcagcaacgagatggccaaggtggacgacagcttcttccacagactggaagagtccttcctggtggaagaggataagaagcacgagcggcaccccatcttcggcaacatcgtggacgaggtggcctaccacgagaagtaccccaccatctaccacctgagaaagaaactggtggacagcaccgacaaggccgacctgcggctgatctatctggccctggcccacatgatcaagttccggggccacttcctgatcgagggcgacctgaaccccgacaacagcgacgtggacaagctgttcatccagctggtgcagacctacaaccagctgttcgaggaaaaccccatcaacgccagcggcgtggacgccaaggccatcctgtctgccagactgagcaagagcagacggctggaaaatctgatcgcccagctgcccggcgagaagaagaatggcctgttcggcaacctgattgccctgagcctgggcctgacccccaacttcaagagcaacttcgacctggccgaggatgccaaactgcagctgagcaaggacacctacgacgacgacctggacaacctgctggcccagatcggcgaccagtacgccgacctgtttctggccgccaagaacctgtccgacgccatcctgctgagcgacatcctgagagtgaacaccgagatcaccaaggcccccctgagcgcctctatgatcaagagatacgacgagcaccaccaggacctgaccctgctgaaagctctcgtgcggcagcagctgcctgagaagtacaaagagattttcttcgaccagagcaagaacggctacgccggctacatcgatggcggagccagccaggaagagttctacaagttcatcaagcccatcctggaaaagatggacggcaccgaggaactgctcgtgaagctgaacagagaggacctgctgcggaagcagcggaccttcgacaacggcagcatcccccaccagatccacctgggagagctgcacgccattctgcggcggcaggaagatttttacccattcctgaaggacaaccgggaaaagatcgagaagatcctgaccttccgcatcccctactacgtgggccctctggccaggggaaacagcagattcgcctggatgaccagaaagagcgaggaaaccatcaccccctggaacttcgaggaagtggtggacaagggcgccagcgcccagagcttcatcgagcggatgaccaacttcgataagaacctgcccaacgagaaggtgctgcccaagcacagcctgctgtacgagtacttcaccgtgtacaacgagctgaccaaagtgaaatacgtgaccgagggaatgagaaagcccgccttcctgagcggcgagcagaaaaaagccatcgtggacctgctgttcaagaccaaccggaaagtgaccgtgaagcagctgaaagaggactacttcaagaaaatcgagtgcttcgactccgtggaaatctccggcgtggaagatcggttcaacgcctccctgggcacataccacgatctgctgaaaattatcaaggacaaggacttcctggacaatgaggaaaacgaggacattctggaagatatcgtgctgaccctgacactgtttgaggacagagagatgatcgaggaacggctgaaaacctatgcccacctgttcgacgacaaagtgatgaagcagctgaagcggcggagatacaccggctggggcaggctgagccggaagctgatcaacggcatccgggacaagcagtccggcaagacaatcctggatttcctgaagtccgacggcttcgccaacagaaacttcatgcagctgatccacgacgacagcctgacctttaaagaggacatccagaaagcccaggtgtccggccagggcgatagcctgcacgagcacattgccaatctggccggcagccccgccattaagaagggcatcctgcagacagtgaaggtggtggacgagctcgtgaaagtgatgggccggcacaagcccgagaacatcgtgatcgaaatggccagagagaaccagaccacccagaagggacagaagaacagccgcgagagaatgaagcggatcgaagagggcatcaaagagctgggcagccagatcctgaaagaacaccccgtggaaaacacccagctgcagaacgagaagctgtacctgtactacctgcagaatgggcgggatatgtacgtggaccaggaactggacatcaaccggctgtccgactacgatgtggacgctatcgtgcctcagagctttctgaaggacgactccatcgataacaaagtgctgactcggagcgacaagaaccggggcaagagcgacaacgtgccctccgaagaggtcgtgaagaagatgaagaactactggcgccagctgctgaatgccaagctgattacccagaggaagttcgacaatctgaccaaggccgagagaggcggcctgagcgaactggataaggccggcttcatcaagagacagctggtggaaacccggcagatcacaaagcacgtggcacagatcctggactcccggatgaacactaagtacgacgagaacgacaaactgatccgggaagtgaaagtgatcaccctgaagtccaagctggtgtccgatttccggaaggatttccagttttacaaagtgcgcgagatcaacaactaccaccacgcccacgacgcctacctgaacgccgtcgtgggaaccgccctgatcaaaaagtaccctaagctggaaagcgagttcgtgtacggcgactacaaggtgtacgacgtgcggaagatgatcgccaagagcgagcaggaaatcggcaaggctaccgccaagtacttcttctacagcaacatcatgaactttttcaagaccgagattaccctggccaacggcgagatccggaagcggcctctgatcgagacaaacggcgaaacaggcgagatcgtgtgggataagggccgggactttgccaccgtgcggaaagtgctgtctatgccccaagtgaatatcgtgaaaaagaccgaggtgcagacaggcggcttcagcaaagagtctatcctgcccaagaggaacagcgacaagctgatcgccagaaagaaggactgggaccctaagaagtacggcggcttcgacagccccaccgtggcctattctgtgctggtggtggccaaagtggaaaagggcaagtccaagaaactgaagagtgtgaaagagctgctggggatcaccatcatggaaagaagcagcttcgagaagaatcccatcgactttctggaagccaagggctacaaagaagtgaaaaaggacctgatcatcaagctgcctaagtactccctgttcgagctggaaaacggccggaagagaatgctggcctctgccggcgaactgcagaagggaaacgaactggccctgccctccaaatatgtgaacttcctgtacctggccagccactatgagaagctgaagggctcccccgaggataatgagcagaaacagctgtttgtggaacagcacaaacactacctggacgagatcatcgagcagatcagcgagttctccaagagagtgatcctggccgacgctaatctggacaaggtgctgagcgcctacaacaagcacagagacaagcctatcagagagcaggccgagaatatcatccacctgtttaccctgaccaatctgggagcccctgccgccttcaagtactttgacaccaccatcgaccggaagaggtacaccagcaccaaagaggtgctggacgccaccctgatccaccagagcatcaccggcctgtacgagacacggatcgacctgtctcagctgggaggcgacgcctatccctatgacgtgcccgattatgccagcctgggcagcggctcccccaagaaaaaacgcaaggtggaagatcctaagaaaaagcggaaagtggacggcggagggccgagctctggcgcacccccaccaagtggagggtctcctgccgggtccccaacatctactgaagaaggcaccagcgaatccgcaacgcccgagtcaggccctggtacctccacagaaccatctgaaggtagtgcgcctggttccccagctggaagccctacttccaccgaagaaggcacgtcaaccgaaccaagtgaaggatctgcccctgggaccagcactgaaccatctgagatgaacaattcccagggaagagtgaccttcgaggacgtgaccgtgaacttcacccaaggcgagtggcagagactgaaccccgagcagagaaacctgtaccgggacgtgatgctggaaaactacagcaacctggtgtccgtcggccagggcgagacaacaaagcctgacgtgatcctgcggctggaacagggcaaagagccttggctggaagaggaagaggtgctcggatctggcagagccgagaagaatggcgatatcggcggacagatctggaagccaaaggatgtgaaagagagtctcagcggcagcgagacccccggtaccagcgagagcgctacacccgaatccggccccggcagccccgccggcagccctacaagcaccgaggagggcacctccgaatccgccacccctgagagcggacccggcagcgagcctgccacaagcggcagcgagacacctggaacaagcgagagcgccacacctgaaagcggccccggaacatccaccgagcctagcgagggcagcgcccctggcacaagcacagagccttccgagagcgccacccccgagagcatgggccctatggagatatacaagacagtgtctgcatggaagagacagccagtgcgggtactgagcctcttcagaaacatcgacaaggtactaaagagtttgggcttcttggaaagcggttctggttctgggggaggaacgctgaagtacgtggaagatgtcacaaatgtcgtgaggagagacgtggagaaatggggcccctttgacctggtgtacggctcgacgcagcccctaggcagctcttgtgatcgctgtcccggctggtacatgttccagttccaccggatcctgcagtatgcgctgcctcgccaggagagtcagcggcccttcttctggatattcatggacaatctgctgctgactgaggatgaccaagagacaactacccgcttccttcagacagaggctgtgaccctccaggatgtccgtggcagagactaccagaatgctatgcgggtgtggagcaacattccagggctgaagagcaagcatgcgcccctgaccccaaaggaagaagagtatctgcaagcccaagtcagaagcaggagcaagctggacgccccgaaagttgacctcctggtgaagaactgccttctcccgctgagagagtacttcaagtatttttctcaaaactcacttcctctttctagcggcaatagtaacgctaacagccgcgggccgagcttcagcagcggcctggtgccgttaagcttgcgcggcagccatatgaaccatgaccaggaatttgaccccccaaaggtttacccacctgtgccagctgagaagaggaagcccatccgcgtgctgtctctctttgatgggattgctacagggctcctggtgctgaaggacctgggcatccaagtggaccgctacattgcctccgaggtgtgtgaggactccatcacggtgggcatggtgcggcaccagggaaagatcatgtacgtcggggacgtccgcagcgtcacacagaagcatatccaggagtggggcccattcgacctggtgattggaggcagtccctgcaatgacctctccattgtcaaccctgcccgcaagggactttatgagggtactggccgcctcttctttgagttctaccgcctcctgcatgatgcgcggcccaaggagggagatgatcgccccttcttctggctctttgagaatgtggtggccatgggcgttagtgacaagagggacatctcgcgatttcttgagtctaaccccgtgatgattgacgccaaagaagtgtctgctgcacacagggcccgttacttctggggtaaccttcctggcatgaacaggcctttggcatccactgtgaatgataagctggagctgcaagagtgtctggagcacggcagaatagccaagttcagcaaagtgaggaccattaccaccaggtcaaactctataaagcagggcaaagaccagcatttccccgtcttcatgaacgagaaggaggacatcctgtggtgcactgaaatggaaagggtgtttggcttccccgtccactacacagacgtctccaacatgagccgcttggcgaggcagagactgctgggccgatcgtggagcgtgccggtcatccgccacctcttcgctccgctgaaggaatattttgcttgtgtg

SEQ ID NO: 352 - DNA, 6666 bp, synthetic construct
  misc_feature 1..6666: note = V16' DNA
  source 1..6666: mol_type = other DNA
atgcctgctgctaagagagtgaaactggatggatccatggacaagaagtacagcatcggcctggccatcggcaccaactctgtgggctgggccgtgatcaccgacgagtacaaggtgcccagcaagaaattcaaggtgctgggcaacaccgaccggcacagcatcaagaagaacctgatcggcgccctgctgttcgacagcggagaaacagccgaggccacccggctgaagagaaccgccagaagaagatacaccagacggaagaaccggatctgctatctgcaagagatcttcagcaacgagatggccaaggtggacgacagcttcttccacagactggaagagtccttcctggtggaagaggataagaagcacgagcggcaccccatcttcggcaacatcgtggacgaggtggcctaccacgagaagtaccccaccatctaccacctgagaaagaaactggtggacagcaccgacaaggccgacctgcggctgatctatctggccctggcccacatgatcaagttccggggccacttcctgatcgagggcgacctgaaccccgacaacagcgacgtggacaagctgttcatccagctggtgcagacctacaaccagctgttcgaggaaaaccccatcaacgccagcggcgtggacgccaaggccatcctgtctgccagactgagcaagagcagacggctggaaaatctgatcgcccagctgcccggcgagaagaagaatggcctgttcggcaacctgattgccctgagcctgggcctgacccccaacttcaagagcaacttcgacctggccgaggatgccaaactgcagctgagcaaggacacctacgacgacgacctggacaacctgctggcccagatcggcgaccagtacgccgacctgtttctggccgccaagaacctgtccgacgccatcctgctgagcgacatcctgagagtgaacaccgagatcaccaaggcccccctgagcgcctctatgatcaagagatacgacgagcaccaccaggacctgaccctgctgaaagctctcgtgcggcagcagctgcctgagaagtacaaagagattttcttcgaccagagcaagaacggctacgccggctacatcgatggcggagccagccaggaagagttctacaagttcatcaagcccatcctggaaaagatggacggcaccgaggaactgctcgtgaagctgaacagagaggacctgctgcggaagcagcggaccttcgacaacggcagcatcccccaccagatccacctgggagagctgcacgccattctgcggcggcaggaagatttttacccattcctgaaggacaaccgggaaaagatcgagaagatcctgaccttccgcatcccctactacgtgggccctctggccaggggaaacagcagattcgcctggatgaccagaaagagcgaggaaaccatcaccccctggaacttcgaggaagtggtggacaagggcgccagcgcccagagcttcatcgagcggatgaccaacttcgataagaacctgcccaacgagaaggtgctgcccaagcacagcctgctgtacgagtacttcaccgtgtacaacgagctgaccaaagtgaaatacgtgaccgagggaatgagaaagcccgccttcctgagcggcgagcagaaaaaagccatcgtggacctgctgttcaagaccaaccggaaagtgaccgtgaagcagctgaaagaggactacttcaagaaaatcgagtgcttcgactccgtggaaatctccggcgtggaagatcggttcaacgcctccctgggcacataccacgatctgctgaaaattatcaaggacaaggacttcctggacaatgaggaaaacgaggacattctggaagatatcgtgctgaccctgacactgtttgaggacagagagatgatcgaggaacggctgaaaacctatgcccacctgttcgacgacaaagtgatgaagcagctgaagcggcggagatacaccggctggggcaggctgagccggaagctgatcaacggcatccgggacaagcagtccggcaagacaatcctggatttcctgaagtccgacggcttcgccaacagaaacttcatgcagctgatccacgacgacagcctgacctttaaagaggacatccagaaagcccaggtgtccggccagggcgatagcctgcacgagcacattgccaatctggccggcagccccgccattaagaagggcatcctgcagacagtgaaggtggtggacgagctcgtgaaagtgatgggccggcacaagcccgagaacatcgtgatcgaaatggccagagagaaccagaccacccagaagggacagaagaacagccgcgagagaatgaagcggatcgaagagggcatcaaagagctgggcagccagatcctgaaagaacaccccgtggaaaacacccagctgcagaacgagaagctgtacctgtactacctgcagaatgggcgggatatgtacgtggaccaggaactggacatcaaccggctgtccgactacgatgtggacgctatcgtgcctcagagctttctgaaggacgactccatcgataacaaagtgctgactcggagcgacaagaaccggggcaagagcgacaacgtgccctccgaagaggtcgtgaagaagatgaagaactactggcgccagctgctgaatgccaagctgattacccagaggaagttcgacaatctgaccaaggccgagagaggcggcctgagcgaactggataaggccggcttcatcaagagacagctggtggaaacccggcagatcacaaagcacgtggcacagatcctggactcccggatgaacactaagtacgacgagaacgacaaactgatccgggaagtgaaagtgatcaccctgaagtccaagctggtgtccgatttccggaaggatttccagttttacaaagtgcgcgagatcaacaactaccaccacgcccacgacgcctacctgaacgccgtcgtgggaaccgccctgatcaaaaagtaccctaagctggaaagcgagttcgtgtacggcgactacaaggtgtacgacgtgcggaagatgatcgccaagagcgagcaggaaatcggcaaggctaccgccaagtacttcttctacagcaacatcatgaactttttcaagaccgagattaccctggccaacggcgagatccggaagcggcctctgatcgagacaaacggcgaaacaggcgagatcgtgtgggataagggccgggactttgccaccgtgcggaaagtgctgtctatgccccaagtgaatatcgtgaaaaagaccgaggtgcagacaggcggcttcagcaaagagtctatcctgcccaagaggaacagcgacaagctgatcgccagaaagaaggactgggaccctaagaagtacggcggcttcgacagccccaccgtggcctattctgtgctggtggtggccaaagtggaaaagggcaagtccaagaaactgaagagtgtgaaagagctgctggggatcaccatcatggaaagaagcagcttcgagaagaatcccatcgactttctggaagccaagggctacaaagaagtgaaaaaggacctgatcatcaagctgcctaagtactccctgttcgagctggaaaacggccggaagagaatgctggcctctgccggcgaactgcagaagggaaacgaactggccctgccctccaaatatgtgaacttcctgtacctggccagccactatgagaagctgaagggctcccccgaggataatgagcagaaacagctgtttgtggaacagcacaaacactacctggacgagatcatcgagcagatcagcgagttctccaagagagtgatcctggccgacgctaatctggacaaggtgctgagcgcctacaacaagcacagagacaagcctatcagagagcaggccgagaatatcatccacctgtttaccctgaccaatctgggagcccctgccgccttcaagtactttgacaccaccatcgaccggaagaggtacaccagcaccaaagaggtgctggacgccaccctgatccaccagagcatcaccggcctgtacgagacacggatcgacctgtctcagctgggaggcgacgcctatccctatgacgtgcccgattatgccagcctgggcagcggctcccccaagaaaaaacgcaaggtggaagatcctaagaaaaagcggaaagtggacggcggagggccgagctctggcgcacccccaccaagtggagggtctcctgccgggtccccaacatctactgaagaaggcaccagcgaatccgcaacgcccgagtcaggccctggtacctccacagaaccatctgaaggtagtgcgcctggttccccagctggaagccctacttccaccgaagaaggcacgtcaaccgaaccaagtgaaggatctgcccctgggaccagcactgaaccatctgagatgaacaattcccagggaagagtgaccttcgaggacgtgaccgtgaacttcacccaaggcgagtggcagagactgaaccccgagcagagaaacctgtaccgggacgtgatgctggaaaactacagcaacctggtgtccgtcggccagggcgagacaacaaagcctgacgtgatcctgcggctggaacagggcaaagagccttggctggaagaggaagaggtgctcggatctggcagagccgagaagaatggcgatatcggcggacagatctggaagccaaaggatgtgaaagagagtctcagcggcagcgagacccccggtaccagcgagggcggccctagcagcggcgcccctccccctagcggcggcagccctgccggatcccctacaagcaccgaagaaggcacaagcgagtccgctacccctgagtccggccctggcacctccacagagcctagcgagggatccgctcctggatcccctgccggaagccctacctccaccgaggagggcacaagcaccgagccttccgagggcagcgcccccggaacaagcaccgaacctagcgagagcgccacccccgagagcatgttcgaaaccgtgcctgtgtggaggagacagccagtccgggtgctgtccctttttgaagacatcaagaaagagctgacgagtttgggctttttggaaagtggttctgacccgggacaactgaagcatgtggttgatgtcacagacacagtgaggaaggatgtggaggagtggggacccttcgatcttgtgtacggcgccacacctcccctgggccacacctgtgaccgtcctcccagctggtacctgttccagttccaccggctcctgcagtacgcacggcccaagccaggcagccccaggcccttcttctggatgttcgtggacaatctggtgctgaacaaggaagacctggacgtcgcatctcgcttcctggagatggagccagtcaccatcccagatgtccacggcggatccttgcagaatgctgtccgcgtgtggagcaacatcccagccataaggagcagcaggcactgggctctggtttcggaagaagaattgtccctgctggcccagaacaagcagagctcgaagctcgcggccaagtggcccaccaagctggtgaagaactgctttctccccctaagagaatatttcaagtatttttcatctagcggcaatagtaacgctaacagccgcgggccgagcttcagcagcggcctggtgccgttaagcttgcgcggcagccatatgaaccatgaccaggaatttgaccccccaaaggtttacccacctgtgccagctgagaagaggaagcccatccgcgtgctgtctctctttgatgggattgctacagggctcctggtgctgaaggacctgggcatccaagtggaccgctacattgcctccgaggtgtgtgaggactccatcacggtgggcatggtgcggcaccagggaaagatcatgtacgtcggggacgtccgcagcgtcacacagaagcatatccaggagtggggcccattcgacctggtgattggaggcagtccctgcaatgacctctccattgtcaaccctgcccgcaagggactttatgagggtactggccgcctcttctttgagttctaccgcctcctgcatgatgcgcggcccaaggagggagatgatcgccccttcttctggctctttgagaatgtggtggccatgggcgttagtgacaagagggacatctcgcgatttcttgagtctaaccccgtgatgattgacgccaaagaagtgtctgctgcacacagggcccgttacttctggggtaaccttcctggcatgaacaggcctttggcatccactgtgaatgataagctggagctgcaagagtgtctggagcacggcagaatagccaagttcagcaaagtgaggaccattaccaccaggtcaaactctataaagcagggcaaagaccagcatttccccgtcttcatgaacgagaaggaggacatcctgtggtgcactgaaatggaaagggtgtttggcttccccgtccactacacagacgtctccaacatgagccgcttggcgaggcagagactgctgggccgatcgtggagcgtgccggtcatccgccacctcttcgctccgctgaaggaatattttgcttgtgtg

SEQ ID NO: 353 - protein, 796 aa, synthetic construct
  REGION 1..796: note = TALE8
VDLRTLGYSQQQQEKIKPKVRSTVAQHHEALVGHGFTHAHIVALSQHPAALGTVAVKYQDMIAALPEATHEAIVGVGKQWSGARALEALLTVAGELRGPPLQLDTGQLLKIAKRGGVTAVEAVHAWRNALTGAPLNLTPDQVVAIASNGGGKQALETVQRLLPVLCQDHGLTPDQVVAIASHDGGKQALETVQRLLPVLCQDHGLTPDQVVAIASNIGGKQALETVQRLLPVLCQDHGLTPDQVVAIASNNGGKQALETVQRLLPVLCQDHGLTPDQVVAIASNGGGKQALETVQRLLPVLCQDHGLTPDQVVAIASNGGGKQALETVQRLLPVLCQDHGLTPDQVVAIASHDGGKQALETVQRLLPVLCQDHGLTPDQVVAIASNIGGKQALETVQRLLPVLCQDHGLTPDQVVAIASNNGGKQALETVQRLLPVLCQDHGLTPDQVVAIASNNGGKQALETVQRLLPVLCQDHGLTPDQVVAIASNNGGKQALETVQRLLPVLCQDHGLTPDQVVAIASNGGGKQALETVQRLLPVLCQDHGLTPDQVVAIASHDGGKQALETVQRLLPVLCQDHGLTPDQVVAIASNGGGKQALETVQRLLPVLCQDHGLTPDQVVAIASNNGGKQALETVQRLLPVLCQDHGLTPDQVVAIASNIGGKQALETVQRLLPVLCQDHGLTPDQVVAIASNNGGKQALETVQRLLPVLCQDHGLTPDQVVAIASHDGGKQALESIVAQLSRPDPALAALTNDHLVALACLGGRPAMDAVKKGLPHAPELIRRVNRRIGERTSHRV

SEQ ID NO: 354 - protein, 796 aa, synthetic construct
  REGION 1..796: note = TALE6
VDLRTLGYSQQQQEKIKPKVRSTVAQHHEALVGHGFTHAHIVALSQHPAALGTVAVKYQDMIAALPEATHEAIVGVGKQWSGARALEALLTVAGELRGPPLQLDTGQLLKIAKRGGVTAVEAVHAWRNALTGAPLNLTPDQVVAIASNGGGKQALETVQRLLPVLCQDHGLTPDQVVAIASNNGGKQALETVQRLLPVLCQDHGLTPDQVVAIASNNGGKQALETVQRLLPVLCQDHGLTPDQVVAIASNIGGKQALETVQRLLPVLCQDHGLTPDQVVAIASNNGGKQALETVQRLLPVLCQDHGLTPDQVVAIASNGGGKQALETVQRLLPVLCQDHGLTPDQVVAIASHDGGKQALETVQRLLPVLCQDHGLTPDQVVAIASNGGGKQALETVQRLLPVLCQDHGLTPDQVVAIASNNGGKQALETVQRLLPVLCQDHGLTPDQVVAIASNNGGKQALETVQRLLPVLCQDHGLTPDQVVAIASHDGGKQALETVQRLLPVLCQDHGLTPDQVVAIASNIGGKQALETVQRLLPVLCQDHGLTPDQVVAIASNGGGKQALETVQRLLPVLCQDHGLTPDQVVAIASHDGGKQALETVQRLLPVLCQDHGLTPDQVVAIASHDGGKQALETVQRLLPVLCQDHGLTPDQVVAIASHDGGKQALETVQRLLPVLCQDHGLTPDQVVAIASNIGGKQALETVQRLLPVLCQDHGLTPDQVVAIASHDGGKQALESIVAQLSRPDPALAALTNDHLVALACLGGRPAMDAVKKGLPHAPELIRRVNRRIGERTSHRV

SEQ ID NO: 355 - protein, 1558 aa, synthetic construct
  REGION 1..1558: note = V76 fusion
  SITE 1558: note = misc_feature - Xaa =
MKRTADGSEFESPKKKRKVGSNHDQEFDPPKVYPPVPAEKRKPIRVLSLFDGIATGLLVLKDLGIQVDRYIASEVCEDSITVGMVRHQGKIMYVGDVRSVTQKHIQEWGPFDLVIGGSPCNDLSIVNPARKGLYEGTGRLFFEFYRLLHDARPKEGDDRPFFWLFENVVAMGVSDKRDISRFLESNPVMIDAKEVSAAHRARYFWGNLPGMNRPLASTVNDKLELQECLEHGRIAKFSKVRTITTRSNSIKQGKDQHFPVFMNEKEDILWCTEMERVFGFPVHYTDVSNMSRLARQRLLGRSWSVPVIRHLFAPLKEYFACVSSGNSNANSRGPSFSSGLVPLSLRGSHMGPMEIYKTVSAWKRQPVRVLSLFRNIDKVLKSLGFLESGSGSGGGTLKYVEDVTNVVRRDVEKWGPFDLVYGSTQPLGSSCDRCPGWYMFQFHRILQYALPRQESQRPFFWIFMDNLLLTEDDQETTTRFLQTEAVTLQDVRGRDYQNAMRVWSNIPGLKSKHAPLTPKEEEYLQAQVRSRSKLDAPKVDLLVKNCLLPLREYFKYFSQNSLPLGGPSSGAPPPSGGSPAGSPTSTEEGTSESATPESGPGTSTEPSEGSAPGSPAGSPTSTEEGTSTEPSEGSAPGTSTEPSEVDLRTLGYSQQQQEKIKPKVRSTVAQHHEALVGHGFTHAHIVALSQHPAALGTVAVKYQDMIAALPEATHEAIVGVGKQWSGARALEALLTVAGELRGPPLQLDTGQLLKIAKRGGVTAVEAVHAWRNALTGAPLNLTPDQVVAIASNGGGKQALETVQRLLPVLCQDHGLTPDQVVAIASHDGGKQALETVQRLLPVLCQDHGLTPDQVVAIASNIGGKQALETVQRLLPVLCQDHGLTPDQVVAIASNNGGKQALETVQRLLPVLCQDHGLTPDQVVAIASNGGGKQALETVQRLLPVLCQDHGLTPDQVVAIASNGGGKQALETVQRLLPVLCQDHGLTPDQVVAIASHDGGKQALETVQRLLPVLCQDHGLTPDQVVAIASNIGGKQALETVQRLLPVLCQDHGLTPDQVVAIASNNGGKQALETVQRLLPVLCQDHGLTPDQVVAIASNNGGKQALETVQRLLPVLCQDHGLTPDQVVAIASNNGGKQALETVQRLLPVLCQDHGLTPDQVVAIASNGGGKQALETVQRLLPVLCQDHGLTPDQVVAIASHDGGKQALETVQRLLPVLCQDHGLTPDQVVAIASNGGGKQALETVQRLLPVLCQDHGLTPDQVVAIASNNGGKQALETVQRLLPVLCQDHGLTPDQVVAIASNIGGKQALETVQRLLPVLCQDHGLTPDQVVAIASNNGGKQALETVQRLLPVLCQDHGLTPDQVVAIASHDGGKQALESIVAQLSRPDPALAALTNDHLVALACLGGRPAMDAVKKGLPHAPELIRRVNRRIGERTSHRVAYPYDVPDYASLGSGSPKKKRKVEDPKKKRKVDGSGSETPGTSESATPESRTLVTFKDVFVDFTREEWKLLDTAQQIVYRNVMLENYKNLVSLGYQLTKPDVILRLEKGEEPLEDGDX

SEQ ID NO: 356 - protein, 1558 aa, synthetic construct
  REGION 1..1558: note = V77 fusion
  SITE 1558: note = misc_feature - Xaa =
MKRTADGSEFESPKKKRKVGSNHDQEFDPPKVYPPVPAEKRKPIRVLSLFDGIATGLLVLKDLGIQVDRYIASEVCEDSITVGMVRHQGKIMYVGDVRSVTQKHIQEWGPFDLVIGGSPCNDLSIVNPARKGLYEGTGRLFFEFYRLLHDARPKEGDDRPFFWLFENVVAMGVSDKRDISRFLESNPVMIDAKEVSAAHRARYFWGNLPGMNRPLASTVNDKLELQECLEHGRIAKFSKVRTITTRSNSIKQGKDQHFPVFMNEKEDILWCTEMERVFGFPVHYTDVSNMSRLARQRLLGRSWSVPVIRHLFAPLKEYFACVSSGNSNANSRGPSFSSGLVPLSLRGSHMGPMEIYKTVSAWKRQPVRVLSLFRNIDKVLKSLGFLESGSGSGGGTLKYVEDVTNVVRRDVEKWGPFDLVYGSTQPLGSSCDRCPGWYMFQFHRILQYALPRQESQRPFFWIFMDNLLLTEDDQETTTRFLQTEAVTLQDVRGRDYQNAMRVWSNIPGLKSKHAPLTPKEEEYLQAQVRSRSKLDAPKVDLLVKNCLLPLREYFKYFSQNSLPLGGPSSGAPPPSGGSPAGSPTSTEEGTSESATPESGPGTSTEPSEGSAPGSPAGSPTSTEEGTSTEPSEGSAPGTSTEPSEVDLRTLGYSQQQQEKIKPKVRSTVAQHHEALVGHGFTHAHIVALSQHPAALGTVAVKYQDMIAALPEATHEAIVGVGKQWSGARALEALLTVAGELRGPPLQLDTGQLLKIAKRGGVTAVEAVHAWRNALTGAPLNLTPDQVVAIASNGGGKQALETVQRLLPVLCQDHGLTPDQVVAIASNNGGKQALETVQRLLPVLCQDHGLTPDQVVAIASNNGGKQALETVQRLLPVLCQDHGLTPDQVVAIASNIGGKQALETVQRLLPVLCQDHGLTPDQVVAIASNNGGKQALETVQRLLPVLCQDHGLTPDQVVAIASNGGGKQALETVQRLLPVLCQDHGLTPDQVVAIASHDGGKQALETVQRLLPVLCQDHGLTPDQVVAIASNGGGKQALETVQRLLPVLCQDHGLTPDQVVAIASNNGGKQALETVQRLLPVLCQDHGLTPDQVVAIASNNGGKQALETVQRLLPVLCQDHGLTPDQVVAIASHDGGKQALETVQRLLPVLCQDHGLTPDQVVAIASNIGGKQALETVQRLLPVLCQDHGLTPDQVVAIASNGGGKQALETVQRLLPVLCQDHGLTPDQVVAIASHDGGKQALETVQRLLPVLCQDHGLTPDQVVAIASHDGGKQALETVQRLLPVLCQDHGLTPDQVVAIASHDGGKQALETVQRLLPVLCQDHGLTPDQVVAIASNIGGKQALETVQRLLPVLCQDHGLTPDQVVAIASHDGGKQALESIVAQLSRPDPALAALTNDHLVALACLGGRPAMDAVKKGLPHAPELIRRVNRRIGERTSHRVAYPYDVPDYASLGSGSPKKKRKVEDPKKKRKVDGSGSETPGTSESATPESRTLVTFKDVFVDFTREEWKLLDTAQQIVYRNVMLENYKNLVSLGYQLTKPDVILRLEKGEEPLEDGDX

SEQ ID NO: 357 - DNA, 8142 bp, synthetic construct
  misc_feature 1..8142: note = V76 DNA
  source 1..8142: mol_type = other DNA
ctttttgataatctcatgaccaaaatcccttaacgtgagttttcgttccactgagcgtcagaccccgtagaaaagatcaaaggatcttcttgagatcctttttttctgcgcgtaatctgctgcttgcaaacaaaaaaaccaccgctaccagcggtggtttgtttgccggatcaagagctaccaactctttttccgaaggtaactggcttcagcagagcgcagataccaaatactgttcttctagtgtagccgtagttaggccaccacttcaagaactctgtagcaccgcctacatacctcgctctgctaatcctgttaccagtggctgctgccagtggcgataagtcgtgtcttaccgggttggactcaagacgatagttaccggataaggcgcagcggtcgggctgaacggggggttcgtgcacacagcccagcttggagcgaacgacctacaccgaactgagatacctacagcgtgagctatgagaaagcgccacgcttcccgaagggagaaaggcggacaggtatccggtaagcggcagggtcggaacaggagagcgcacgagggagcttccagggggaaacgcctggtatctttatagtcctgtcgggtttcgccacctctgacttgagcgtcgatttttgtgatgctcgtcaggggggcggagcctatggaaaaacgccagcaacgcggcctttttacggttcctggccttttgctggccttttgctcacatgttctttcctgcgttatcccctgattctgtggataaccgtattaccgcctttgagtgagctgataccgctcgccgcagccgaacgaccgagcgcagcgagtcagtgagcgaggaagcggaagagcgcccaatacgcaaaccgcctctccccgcgcgttggccgattcattaatgcagctggcacgacaggtttcccgactggaaagcgggcagtgagcgcaacgcaattaatgtgagttagctcactcattaggcaccccaggctttacactttatgcttccggctcgtatgttgtgtggaattgtgagcggataacaatttcacacaggaaacagctatgaccatgattacgcctctagaaagctttaatacgactcactataaggactcactatttgttttcgcgcccagttgcaaaaagtgtcgacatttgcttctgacacaactgtgttcactagcaacctcaaacagacaccgccaccatgaaacggactgctgacggcagcgaatttgagagccccaagaagaagaggaaagtcggatccaaccatgaccaggaatttgaccccccaaaggtttacccacctgtgccagctgagaagaggaagcccatccgcgtgctgtctctctttgatgggattgctacagggctcctggtgctgaaggacctgggcatccaagtggaccgctacattgcctccgaggtgtgtgaggactccatcacggtgggcatggtgcggcaccagggaaagatcatgtacgtcggggacgtccgcagcgtcacacagaagcatatccaggagtggggcccattcgacctggtgattggaggcagtccctgcaatgacctctccattgtcaaccctgcccgcaagggactttatgagggtactggccgcctcttctttgagttctaccgcctcctgcatgatgcgcggcccaaggagggagatgatcgccccttcttctggctctttgagaatgtggtggccatgggcgttagtgacaagagggacatctcgcgatttcttgagtctaaccccgtgatgattgacgccaaagaagtgtctgctgcacacagggcccgttacttctggggtaaccttcctggcatgaacaggcctttggcatccactgtgaatgataagctggagctgcaagagtgtctggagcacggcagaatagccaagttcagcaaagtgaggaccattaccaccaggtcaaactctataaagcagggcaaagaccagcatttccccgtcttcatgaacgagaaggaggacatcctgtggtgcactgaaatggaaagggtgtttggcttccccgtccactacacagacgtatccaacatgagccgcttggcgaggcagagactgctgggccgatcgtggagcgtgccggtcatccgccacctcttcgctccgctgaaggaatattttgcttgtgtgtctagcggcaatagtaacgctaacagccgcgggccgagcttcagcagcggcctggtgccgttaagcttgcgcggcagccatatgggccctatggagatatacaagacagtgtctgcatggaagagacagccagtgcgggtactgagcctcttcagaaacatcgacaaggtactaaagagtttgggcttcttggaaagcggttctggttctgggggaggaacgctgaagtacgtggaagatgtcacaaatgtcgtgaggagagatgtggagaaatggggcccctttgacctggtgtacggctcgacgcagcccctaggcagctcttgtgatcgctgtcccggctggtacatgttccagttccaccggatcctgcagtatgcgctgcctcgccaggagagtcagcggcccttcttctggatattcatggacaatctgctgctgactgaggatgaccaagagacaactacccgcttccttcagacagaggctgtgaccctccaggatgtccgtggcagagactaccagaatgctatgcgggtgtggagcaacattccagggctgaagagcaagcatgcgcccctgaccccaaaggaagaagagtatctgcaagcccaagtcagaagcaggagcaagctggacgccccgaaagttgacctcctggtgaagaactgccttctcccgctgagagagtacttcaagtatttttctcaaaactcacttcctcttggagggccgagctctggcgcacccccaccaagtggagggtctcctgccgggtccccaacatctactgaagaaggcaccagcgaatccgcaacgcccgagtcaggccctggtacctccacagaaccatctgaaggtagtgcgcctggttccccagctggaagccctacttccaccgaagaaggcacgtcaaccgaaccaagtgaaggatctgcccctgggaccagcactgaaccatctgaggtggatctacgcacgctcggctacagccagcagcaacaggagaagatcaaaccgaaggttcgttcgacagtggcgcagcaccacgaggcactggtcggccatgggtttacacacgcgcacatcgttgcgctcagccaacacccggcagcgttagggaccgtcgctgtcaagtatcaggacatgatcgcagcgttgccagaggcgacacacgaagcgatcgttggcgtcggcaaacagtggtccggcgcacgcgctctggaggccttgctcacggtggcgggagagttgagaggtccaccgttacagttggacacaggccaacttctcaagattgcaaaacgtggcggcgtgaccgcagtggaggcagtgcatgcatggcgcaatgcactgacgggtgcccccctgaacctgaccccggaccaagtggtggctatcgccagcaacggtggcggcaagcaagcgctcgaaacggtgcagcggctgttgccggtgctgtgccaggaccatggcctgactccggaccaagtggtggctatcgccagccacgatggcggcaagcaagcgctcgaaacggtgcagcggctgttgccggtgctgtgccaggaccatggcctgaccccggaccaagtggtggctatcgccagcaacattggcggcaagcaagcgctcgaaacggtgcagcggctgttgccggtgctgtgccaggaccatggcctgaccccggaccaagtggtggctatcgccagcaacaatggcggcaagcaagcgctcgaaacggtgcagcggctgttgccggtgctgtgccaggaccatggcctgaccccggaccaagtggtggctatcgccagcaacggtggcggcaagcaagcgctcgaaacggtgcagcggctgttgccggtgctgtgccaggaccatggcctgaccccggaccaagtggtggctatcgccagcaacggtggcggcaagcaagcgctcgaaacggtgcagcggctgttgccggtgctgtgccaggaccatggcctgactccggaccaagtggtggctatcgccagccacgatggcggcaagcaagcgctcgaaacggtgcagcggctgttgccggtgctgtgccaggaccatggcctgaccccggaccaagtggtggctatcgccagcaacattggcggcaagcaagcgctcgaaacggtgcagcggctgttgccggtgctgtgccaggaccatggcctgaccccggaccaagtggtggctatcgccagcaacaatggcggcaagcaagcgctcgaaacggtgcagcggctgttgccggtgctgtgccaggaccatggcctgaccccggaccaagtggtggctatcgccagcaacaatggcggcaagcaagcgctcgaaacggtgcagcggctgttgccggtgctgtgccaggaccatggcctgaccccggaccaagtggtggctatcgccagcaacaatggcggcaagcaagcgctcgaaacggtgcagcggctgttgccggtgctgtgccaggaccatggcctgaccccggaccaagtggtggctatcgccagcaacggtggcggcaagcaagcgctcgaaacggtgcagcggctgttgccggtgctgtgccaggaccatggcctgactccggaccaagtggtggctatcgccagccacgatggcggcaagcaagcgctcgaaacggtgcagcggctgttgccggtgctgtgccaggaccatggcctgaccccggaccaagtggtggctatcgccagcaacggtggcggcaagcaagcgctcgaaacggtgcagcggctgttgccggtgctgtgccaggaccatggcctgaccccggaccaagtggtggctatcgccagcaacaatggcggcaagcaagcgctcgaaacggtgcagcggctgttgccggtgctgtgccaggaccatggcctgaccccggaccaagtggtggctatcgccagcaacattggcggcaagcaagcgctcgaaacggtgcagcggctgttgccggtgctgtgccaggaccatggcctgaccccggaccaagtggtggctatcgccagcaacaatggcggcaagcaagcgctcgaaacggtgcagcggctgttgccggtgctgtgccaggaccatggcctgaccccggaccaagtggtggctatcgccagccacgatggcggcaagcaagcgctcgaaagcattgtggcccagctgagccggcctgatccggcgttggccgcgttgaccaacgaccacctcgtcgccttggcctgcctcggcggacgtcctgccatggatgcagtgaaaaagggattgccgcacgcgccggaattgatcagaagagtcaatcgccgtattggcgaacgcacgtcccatcgcgttgcctatccctatgacgtgcccgattatgccagcctgggcagcggctcccccaagaaaaaacgcaaggtggaagatcctaagaaaaagcggaaagtggacggcagcggcagcgagacccccggtaccagcgagagcgccacccccgagagccggacactggtgaccttcaaggatgtatttgtggacttcaccagggaggagtggaagctgctggacactgctcagcagatcgtgtacagaaatgtgatgctggagaactataagaacctggtttccttgggttatcagcttactaagccagatgtgatcctccggttggagaagggagaagagcccctcgaggatggggactaagatcccaagcacgcagcaatgcagctcaaaacgcttagcctagccacacccccacgggaaacagcagtgattaacctttagcaataaacgaaagtttaactaagctatactaaccccagggttggtcaatttcgtgccagccacaccctggtactgcatgcacgcaatgctagctgcccctttcccgtcctgggcaccccgagtctcccccgaccccgggtcccaggtatgctcccacctccacctgccccactcaccacctctgctagttccagacacctccgagacgaggaaaaaaaaaaaaaaaaaaaaaaaaaaaaaaaaaaaaaaaaaaaaaaaaaaaaaaaaaaaaaaaaaaaaaaaaaaaaaaaaaaaaaaaaaaaaaaaaaaaaaaaaaaaaaaaaaaaaaaaaaaaaaaaaaaaaaaaaaaaaaaaaaaaaaaaaaaaaaaaaaaaaaaaaaaaaaaaaaaaaaaaaaaaaaaaaaaaaaaaaaaaaaaaaaaaaaaaaaaaaaaaaaaaaaaaaaaaaaaaaaaaaaaaaaaaaaaaaaaaaaaaaaaaaaaaaaaaaaaaaaaaaaaaaaaaaaaaaaaaaaaaaaaaaaaaaaaaaaaaaaaaaaaaaaaaaaaaaaaaaaaaaaaaaaaaaaaaaaaaaaaaaaaaaaaaaaaaaaaaaaaaaaaaaaaaaaaccgtcttcaagctttctagaaattcactggccgtcgttttacaacgtcgtgactgggaaaaccctggcgttacccaacttaatcgccttgcagcacatccccctttcgccagctggcgtaatagcgaagaggcccgcaccgatcgcccttcccaacagttgcgcagcctgaatggcgaatggcgcctgatgcggtattttctccttacgcatctgtgcggtatttcacaccgcatatggtgcactctcagtacaatctgctctgatgccgcatagttaagccagccccgacacccgccaacacccgctgacgcgccctgacgggcttgtctgctcccggcatccgcttacagacaagctgtgaccgtctccgggagctgcatgtgtcagaggttttcaccgtcatcaccgaaacgcgcgagacgaaagggcctcgtgatacgcctatttttataggttaatgtcatgataataatggtttcttagacgtcaggtggcacttttcggggaaatgtgcgcggaacccctatttgtttatttttctaaatacattcaaatatgtatccgctcatgagacaataaccctgataaatgcttcaataatattgaaaaaggaagagtatgagtattcaacatttccgtgtcgcccttattcccttttttgcggcattttgccttcctgtttttgctcacccagaaacgctggtgaaagtaaaagatgctgaagatcagttgggtgcacgagtgggttacatcgaactggatctcaacagcggtaagatccttgagagttttcgccccgaagaacgttttccaatgatgagcacttttaaagttctgctatgtggcgcggtattatcccgtattgacgccgggcaagagcaactcggtcgccgcatacactattctcagaatgacttggttgagtactcaccagtcacagaaaagcatcttacggatggcatgacagtaagagaattatgcagtgctgccataaccatgagtgataacactgcggccaacttacttctgacaacgatcggaggaccgaaggagctaaccgcttttttgcacaacatgggggatcatgtaactcgccttgatcgttgggaaccggagctgaatgaagccataccaaacgacgagcgtgacaccacgatgcctgtagcaatggcaacaacgttgcgcaaactattaactggcgaactacttactctagcttcccggcaacaattaatagactggatggaggcggataaagttgcaggaccacttctgcgctcggcccttccggctggctggtttattgctgataaatctggagccggtgagcgtgggtctcgcggtatcattgcagcactggggccagatggtaagccctcccgtatcgtagttatctacacgacggggagtcaggcaactatggatgaacgaaatagacagatcgctgagataggtgcctcactgattaagcattggtaactgtcagaccaagtttactcatatatactttagattgatttaaaacttcatttttaatttaaaaggatctaggtgaagatc

SEQ ID NO: 358 - DNA, 8142 bp, synthetic construct
  misc_feature 1..8142: note = V77 DNA
  source 1..8142: mol_type = other DNA
ctttttgataatctcatgaccaaaatcccttaacgtgagttttcgttccactgagcgtcagaccccgtagaaaagatcaaaggatcttcttgagatcctttttttctgcgcgtaatctgctgcttgcaaacaaaaaaaccaccgctaccagcggtggtttgtttgccggatcaagagctaccaactctttttccgaaggtaactggcttcagcagagcgcagataccaaatactgttcttctagtgtagccgtagttaggccaccacttcaagaactctgtagcaccgcctacatacctcgctctgctaatcctgttaccagtggctgctgccagtggcgataagtcgtgtcttaccgggttggactcaagacgatagttaccggataaggcgcagcggtcgggctgaacggggggttcgtgcacacagcccagcttggagcgaacgacctacaccgaactgagatacctacagcgtgagctatgagaaagcgccacgcttcccgaagggagaaaggcggacaggtatccggtaagcggcagggtcggaacaggagagcgcacgagggagcttccagggggaaacgcctggtatctttatagtcctgtcgggtttcgccacctctgacttgagcgtcgatttttgtgatgctcgtcaggggggcggagcctatggaaaaacgccagcaacgcggcctttttacggttcctggccttttgctggccttttgctcacatgttctttcctgcgttatcccctgattctgtggataaccgtattaccgcctttgagtgagctgataccgctcgccgcagccgaacgaccgagcgcagcgagtcagtgagcgaggaagcggaagagcgcccaatacgcaaaccgcctctccccgcgcgttggccgattcattaatgcagctggcacgacaggtttcccgactggaaagcgggcagtgagcgcaacgcaattaatgtgagttagctcactcattaggcaccccaggctttacactttatgcttccggctcgtatgttgtgtggaattgtgagcggataacaatttcacacaggaaacagctatgaccatgattacgcctctagaaagctttaatacgactcactataaggactcactatttgttttcgcgcccagttgcaaaaagtgtcgacatttgcttctgacacaactgtgttcactagcaacctcaaacagacaccgccaccatgaaacggactgctgacggcagcgaatttgagagccccaagaagaagaggaaagtcggatccaaccatgaccaggaatttgaccccccaaaggtttacccacctgtgccagctgagaagaggaagcccatccgcgtgctgtctctctttgatgggattgctacagggctcctggtgctgaaggacctgggcatccaagtggaccgctacattgcctccgaggtgtgtgaggactccatcacggtgggcatggtgcggcaccagggaaagatcatgtacgtcggggacgtccgcagcgtcacacagaagcatatccaggagtggggcccattcgacctggtgattggaggcagtccctgcaatgacctctccattgtcaaccctgcccgcaagggactttatgagggtactggccgcctcttctttgagttctaccgcctcctgcatgatgcgcggcccaaggagggagatgatcgccccttcttctggctctttgagaatgtggtggccatgggcgttagtgacaagagggacatctcgcgatttcttgagtctaaccccgtgatgattgacgccaaagaagtgtctgctgcacacagggcccgttacttctggggtaaccttcctggcatgaacaggcctttggcatccactgtgaatgataagctggagctgcaagagtgtctggagcacggcagaatagccaagttcagcaaagtgaggaccattaccaccaggtcaaactctataaagcagggcaaagaccagcatttccccgtcttcatgaacgagaaggaggacatcctgtggtgcactgaaatggaaagggtgtttggcttccccgtccactacacagacgtatccaacatgagccgcttggcgaggcagagactgctgggccgatcgtggagcgtgccggtcatccgccacctcttcgctccgctgaaggaatattttgcttgtgtgtctagcggcaatagtaacgctaacagccgcgggccgagcttcagcagcggcctggtgccgttaagcttgcgcggcagccatatgggccctatggagatatacaagacagtgtctgcatggaagagacagccagtgcgggtactgagcctcttcagaaacatcgacaaggtactaaagagtttgggcttcttggaaagcggttctggttctgggggaggaacgctgaagtacgtggaagatgtcacaaatgtcgtgaggagagatgtggagaaatggggcccctttgacctggtgtacggctcgacgcagcccctaggcagctcttgtgatcgctgtcccggctggtacatgttccagttccaccggatcctgcagtatgcgctgcctcgccaggagagtcagcggcccttcttctggatattcatggacaatctgctgctgactgaggatgaccaagagacaactacccgcttccttcagacagaggctgtgaccctccaggatgtccgtggcagagactaccagaatgctatgcgggtgtggagcaacattccagggctgaagagcaagcatgcgcccctgaccccaaaggaagaagagtatctgcaagcccaagtcagaagcaggagcaagctggacgccccgaaagttgacctcctggtgaagaactgccttctcccgctgagagagtacttcaagtatttttctcaaaactcacttcctcttggagggccgagctctggcgcacccccaccaagtggagggtctcctgccgggtccccaacatctactgaagaaggcaccagcgaatccgcaacgcccgagtcaggccctggtacctccacagaaccatctgaaggtagtgcgcctggttccccagctggaagccctacttccaccgaagaaggcacgtcaaccgaaccaagtgaaggatctgcccctgggaccagcactgaaccatctgaggtggatctacgcacgctcggctacagccagcagcaacaggagaagatcaaaccgaaggttcgttcgacagtggcgcagcaccacgaggcactggtcggccatgggtttacacacgcgcacatcgttgcgctcagccaacacccggcagcgttagggaccgtcgctgtcaagtatcaggacatgatcgcagcgttgccagaggcgacacacgaagcgatcgttggcgtcggcaaacagtggtccggcgcacgcgctctggaggccttgctcacggtggcgggagagttgagaggtccaccgttacagttggacacaggccaacttctcaagattgcaaaacgtggcggcgtgaccgcagtggaggcagtgcatgcatggcgcaatgcactgacgggtgcccccctgaacctgaccccggaccaagtggtggctatcgccagcaacggtggcggcaagcaagcgctcgaaacggtgcagcggctgttgccggtgctgtgccaggaccatggcctgaccccggaccaagtggtggctatcgccagcaacaatggcggcaagcaagcgctcgaaacggtgcagcggctgttgccggtgctgtgccaggaccatggcctgaccccggaccaagtggtggctatcgccagcaacaatggcggcaagcaagcgctcgaaacggtgcagcggctgttgccggtgctgtgccaggaccatggcctgaccccggaccaagtggtggctatcgccagcaacattggcggcaagcaagcgctcgaaacggtgcagcggctgttgccggtgctgtgccaggaccatggcctgaccccggaccaagtggtggctatcgccagcaacaatggcggcaagcaagcgctcgaaacggtgcagcggctgttgccggtgctgtgccaggaccatggcctgaccccggaccaagtggtggctatcgccagcaacggtggcggcaagcaagcgctcgaaacggtgcagcggctgttgccggtgctgtgccaggaccatggcctgactccggaccaagtggtggctatcgccagccacgatggcggcaagcaagcgctcgaaacggtgcagcggctgttgccggtgctgtgccaggaccatggcctgaccccggaccaagtggtggctatcgccagcaacggtggcggcaagcaagcgctcgaaacggtgcagcggctgttgccggtgctgtgccaggaccatggcctgaccccggaccaagtggtggctatcgccagcaacaatggcggcaagcaagcgctcgaaacggtgcagcggctgttgccggtgctgtgccaggaccatggcctgaccccggaccaagtggtggctatcgccagcaacaatggcggcaagcaagcgctcgaaacggtgcagcggctgttgccggtgctgtgccaggaccatggcctgaccccggaccaagtggtggctatcgccagccacgatggcggcaagcaagcgctcgaaacggtgcagcggctgttgccggtgctgtgccaggaccatggcctgaccccggaccaagtggtggctatcgccagcaacattggcggcaagcaagcgctcgaaacggtgcagcggctgttgccggtgctgtgccaggaccatggcctgaccccggaccaagtggtggctatcgccagcaacggtggcggcaagcaagcgctcgaaacggtgcagcggctgttgccggtgctgtgccaggaccatggcctgactccggaccaagtggtggctatcgccagccacgatggcggcaagcaagcgctcgaaacggtgcagcggctgttgccggtgctgtgccaggaccatggcctgactccggaccaagtggtggctatcgccagccacgatggcggcaagcaagcgctcgaaacggtgcagcggctgttgccggtgctgtgccaggaccatggcctgactccggaccaagtggtggctatcgccagccacgatggcggcaagcaagcgctcgaaacggtgcagcggctgttgccggtgctgtgccaggaccatggcctgaccccggaccaagtggtggctatcgccagcaacattggcggcaagcaagcgctcgaaacggtgcagcggctgttgccggtgctgtgccaggaccatggcctgaccccggaccaagtggtggctatcgccagccacgatggcggcaagcaagcgctcgaaagcattgtggcccagctgagccggcctgatccggcgttggccgcgttgaccaacgaccacctcgtcgccttggcctgcctcggcggacgtcctgccatggatgcagtgaaaaagggattgccgcacgcgccggaattgatcagaagagtcaatcgccgtattggcgaacgcacgtcccatcgcgttgcctatccctatgacgtgcccgattatgccagcctgggcagcggctcccccaagaaaaaacgcaaggtggaagatcctaagaaaaagcggaaagtggacggcagcggcagcgagacccccggtaccagcgagagcgccacccccgagagccggacactggtgaccttcaaggatgtatttgtggacttcaccagggaggagtggaagctgctggacactgctcagcagatcgtgtacagaaatgtgatgctggagaactataagaacctggtttccttgggttatcagcttactaagccagatgtgatcctccggttggagaagggagaagagcccctcgaggatggggactaagatcccaagcacgcagcaatgcagctcaaaacgcttagcctagccacacccccacgggaaacagcagtgattaacctttagcaataaacgaaagtttaactaagctatactaaccccagggttggtcaatttcgtgccagccacaccctggtactgcatgcacgcaatgctagctgcccctttcccgtcctgggcaccccgagtctcccccgaccccgggtcccaggtatgctcccacctccacctgccccactcaccacctctgctagttccagacacctccgagacgaggaaaaaaaaaaaaaaaaaaaaaaaaaaaaaaaaaaaaaaaaaaaaaaaaaaaaaaaaaaaaaaaaaaaaaaaaaaaaaaaaaaaaaaaaaaaaaaaaaaaaaaaaaaaaaaaaaaaaaaaaaaaaaaaaaaaaaaaaaaaaaaaaaaaaaaaaaaaaaaaaaaaaaaaaaaaaaaaaaaaaaaaaaaaaaaaaaaaaaaaaaaaaaaaaaaaaaaaaaaaaaaaaaaaaaaaaaaaaaaaaaaaaaaaaaaaaaaaaaaaaaaaaaaaaaaaaaaaaaaaaaaaaaaaaaaaaaaaaaaaaaaaaaaaaaaaaaaaaaaaaaaaaaaaaaaaaaaaaaaaaaaaaaaaaaaaaaaaaaaaaaaaaaaaaaaaaaaaaaaaaaaaaaaaaaaaaaaccgtcttcaagctttctagaaattcactggccgtcgttttacaacgtcgtgactgggaaaaccctggcgttacccaacttaatcgccttgcagcacatccccctttcgccagctggcgtaatagcgaagaggcccgcaccgatcgcccttcccaacagttgcgcagcctgaatggcgaatggcgcctgatgcggtattttctccttacgcatctgtgcggtatttcacaccgcatatggtgcactctcagtacaatctgctctgatgccgcatagttaagccagccccgacacccgccaacacccgctgacgcgccctgacgggcttgtctgctcccggcatccgcttacagacaagctgtgaccgtctccgggagctgcatgtgtcagaggttttcaccgtcatcaccgaaacgcgcgagacgaaagggcctcgtgatacgcctatttttataggttaatgtcatgataataatggtttcttagacgtcaggtggcacttttcggggaaatgtgcgcggaacccctatttgtttatttttctaaatacattcaaatatgtatccgctcatgagacaataaccctgataaatgcttcaataatattgaaaaaggaagagtatgagtattcaacatttccgtgtcgcccttattcccttttttgcggcattttgccttcctgtttttgctcacccagaaacgctggtgaaagtaaaagatgctgaagatcagttgggtgcacgagtgggttacatcgaactggatctcaacagcggtaagatccttgagagttttcgccccgaagaacgttttccaatgatgagcacttttaaagttctgctatgtggcgcggtattatcccgtattgacgccgggcaagagcaactcggtcgccgcatacactattctcagaatgacttggttgagtactcaccagtcacagaaaagcatcttacggatggcatgacagtaagagaattatgcagtgctgccataaccatgagtgataacactgcggccaacttacttctgacaacgatcggaggaccgaaggagctaaccgcttttttgcacaacatgggggatcatgtaactcgccttgatcgttgggaaccggagctgaatgaagccataccaaacgacgagcgtgacaccacgatgcctgtagcaatggcaacaacgttgcgcaaactattaactggcgaactacttactctagcttcccggcaacaattaatagactggatggaggcggataaagttgcaggaccacttctgcgctcggcccttccggctggctggtttattgctgataaatctggagccggtgagcgtgggtctcgcggtatcattgcagcactggggccagatggtaagccctcccgtatcgtagttatctacacgacggggagtcaggcaactatggatgaacgaaatagacagatcgctgagataggtgcctcactgattaagcattggtaactgtcagaccaagtttactcatatatactttagattgatttaaaacttcatttttaatttaaaaggatctaggtgaagatc

SEQ ID NO: 359 - DNA, 4674 bp, synthetic construct
  misc_feature 1..4674: note = V76 CDS
  source 1..4674: mol_type = other DNA
atgaaacggactgctgacggcagcgaatttgagagccccaagaagaagaggaaagtcggatccaaccatgaccaggaatttgaccccccaaaggtttacccacctgtgccagctgagaagaggaagcccatccgcgtgctgtctctctttgatgggattgctacagggctcctggtgctgaaggacctgggcatccaagtggaccgctacattgcctccgaggtgtgtgaggactccatcacggtgggcatggtgcggcaccagggaaagatcatgtacgtcggggacgtccgcagcgtcacacagaagcatatccaggagtggggcccattcgacctggtgattggaggcagtccctgcaatgacctctccattgtcaaccctgcccgcaagggactttatgagggtactggccgcctcttctttgagttctaccgcctcctgcatgatgcgcggcccaaggagggagatgatcgccccttcttctggctctttgagaatgtggtggccatgggcgttagtgacaagagggacatctcgcgatttcttgagtctaaccccgtgatgattgacgccaaagaagtgtctgctgcacacagggcccgttacttctggggtaaccttcctggcatgaacaggcctttggcatccactgtgaatgataagctggagctgcaagagtgtctggagcacggcagaatagccaagttcagcaaagtgaggaccattaccaccaggtcaaactctataaagcagggcaaagaccagcatttccccgtcttcatgaacgagaaggaggacatcctgtggtgcactgaaatggaaagggtgtttggcttccccgtccactacacagacgtatccaacatgagccgcttggcgaggcagagactgctgggccgatcgtggagcgtgccggtcatccgccacctcttcgctccgctgaaggaatattttgcttgtgtgtctagcggcaatagtaacgctaacagccgcgggccgagcttcagcagcggcctggtgccgttaagcttgcgcggcagccatatgggccctatggagatatacaagacagtgtctgcatggaagagacagccagtgcgggtactgagcctcttcagaaacatcgacaaggtactaaagagtttgggcttcttggaaagcggttctggttctgggggaggaacgctgaagtacgtggaagatgtcacaaatgtcgtgaggagagatgtggagaaatggggcccctttgacctggtgtacggctcgacgcagcccctaggcagctcttgtgatcgctgtcccggctggtacatgttccagttccaccggatcctgcagtatgcgctgcctcgccaggagagtcagcggcccttcttctggatattcatggacaatctgctgctgactgaggatgaccaagagacaactacccgcttccttcagacagaggctgtgaccctccaggatgtccgtggcagagactaccagaatgctatgcgggtgtggagcaacattccagggctgaagagcaagcatgcgcccctgaccccaaaggaagaagagtatctgcaagcccaagtcagaagcaggagcaagctggacgccccgaaagttgacctcctggtgaagaactgccttctcccgctgagagagtacttcaagtatttttctcaaaactcacttcctcttggagggccgagctctggcgcacccccaccaagtggagggtctcctgccgggtccccaacatctactgaagaaggcaccagcgaatccgcaacgcccgagtcaggccctggtacctccacagaaccatctgaaggtagtgcgcctggttccccagctggaagccctacttccaccgaagaaggcacgtcaaccgaaccaagtgaaggatctgcccctgggaccagcactgaaccatctgaggtggatctacgcacgctcggctacagccagcagcaacaggagaagatcaaaccgaaggttcgttcgacagtggcgcagcaccacgaggcactggtcggccatgggtttacacacgcgcacatcgttgcgctcagccaacacccggcagcgttagggaccgtcgctgtcaagtatcaggacatgatcgcagcgttgccagaggcgacacacgaagcgatcgttggcgtcggcaaacagtggtccggcgcacgcgctctggaggccttgctcacggtggcgggagagttgagaggtccaccgttacagttggacacaggccaacttctcaagattgcaaaacgtggcggcgtgaccgcagtggaggcagtgcatgcatggcgcaatgcactgacgggtgcccccctgaacctgaccccggaccaagtggtggctatcgccagcaacggtggcggcaagcaagcgctcgaaacggtgcagcggctgttgccggtgctgtgccaggaccatggcctgactccggaccaagtggtggctatcgccagccacgatggcggcaagcaagcgctcgaaacggtgcagcggctgttgccggtgctgtgccaggaccatggcctgaccccggaccaagtggtggctatcgccagcaacattggcggcaagcaagcgctcgaaacggtgcagcggctgttgccggtgctgtgccaggaccatggcctgaccccggaccaagtggtggctatcgccagcaacaatggcggcaagcaagcgctcgaaacggtgcagcggctgttgccggtgctgtgccaggaccatggcctgaccccggaccaagtggtggctatcgccagcaacggtggcggcaagcaagcgctcgaaacggtgcagcggctgttgccggtgctgtgccaggaccatggcctgaccccggaccaagtggtggctatcgccagcaacggtggcggcaagcaagcgctcgaaacggtgcagcggctgttgccggtgctgtgccaggaccatggcctgactccggaccaagtggtggctatcgccagccacgatggcggcaagcaagcgctcgaaacggtgcagcggctgttgccggtgctgtgccaggaccatggcctgaccccggaccaagtggtggctatcgccagcaacattggcggcaagcaagcgctcgaaacggtgcagcggctgttgccggtgctgtgccaggaccatggcctgaccccggaccaagtggtggctatcgccagcaacaatggcggcaagcaagcgctcgaaacggtgcagcggctgttgccggtgctgtgccaggaccatggcctgaccccggaccaagtggtggctatcgccagcaacaatggcggcaagcaagcgctcgaaacggtgcagcggctgttgccggtgctgtgccaggaccatggcctgaccccggaccaagtggtggctatcgccagcaacaatggcggcaagcaagcgctcgaaacggtgcagcggctgttgccggtgctgtgccaggaccatggcctgaccccggaccaagtggtggctatcgccagcaacggtggcggcaagcaagcgctcgaaacggtgcagcggctgttgccggtgctgtgccaggaccatggcctgactccggaccaagtggtggctatcgccagccacgatggcggcaagcaagcgctcgaaacggtgcagcggctgttgccggtgctgtgccaggaccatggcctgaccccggaccaagtggtggctatcgccagcaacggtggcggcaagcaagcgctcgaaacggtgcagcggctgttgccggtgctgtgccaggaccatggcctgaccccggaccaagtggtggctatcgccagcaacaatggcggcaagcaagcgctcgaaacggtgcagcggctgttgccggtgctgtgccaggaccatggcctgaccccggaccaagtggtggctatcgccagcaacattggcggcaagcaagcgctcgaaacggtgcagcggctgttgccggtgctgtgccaggaccatggcctgaccccggaccaagtggtggctatcgccagcaacaatggcggcaagcaagcgctcgaaacggtgcagcggctgttgccggtgctgtgccaggaccatggcctgaccccggaccaagtggtggctatcgccagccacgatggcggcaagcaagcgctcgaaagcattgtggcccagctgagccggcctgatccggcgttggccgcgttgaccaacgaccacctcgtcgccttggcctgcctcggcggacgtcctgccatggatgcagtgaaaaagggattgccgcacgcgccggaattgatcagaagagtcaatcgccgtattggcgaacgcacgtcccatcgcgttgcctatccctatgacgtgcccgattatgccagcctgggcagcggctcccccaagaaaaaacgcaaggtggaagatcctaagaaaaagcggaaagtggacggcagcggcagcgagacccccggtaccagcgagagcgccacccccgagagccggacactggtgaccttcaaggatgtatttgtggacttcaccagggaggagtggaagctgctggacactgctcagcagatcgtgtacagaaatgtgatgctggagaactataagaacctggtttccttgggttatcagcttactaagccagatgtgatcctccggttggagaagggagaagagcccctcgaggatggggactaa

SEQ ID NO: 360 - DNA, 4674 bp, synthetic construct
  misc_feature 1..4674: note = V77 CDS
  source 1..4674: mol_type = other DNA
atgaaacggactgctgacggcagcgaatttgagagccccaagaagaagaggaaagtcggatccaaccatgaccaggaatttgaccccccaaaggtttacccacctgtgccagctgagaagaggaagcccatccgcgtgctgtctctctttgatgggattgctacagggctcctggtgctgaaggacctgggcatccaagtggaccgctacattgcctccgaggtgtgtgaggactccatcacggtgggcatggtgcggcaccagggaaagatcatgtacgtcggggacgtccgcagcgtcacacagaagcatatccaggagtggggcccattcgacctggtgattggaggcagtccctgcaatgacctctccattgtcaaccctgcccgcaagggactttatgagggtactggccgcctcttctttgagttctaccgcctcctgcatgatgcgcggcccaaggagggagatgatcgccccttcttctggctctttgagaatgtggtggccatgggcgttagtgacaagagggacatctcgcgatttcttgagtctaaccccgtgatgattgacgccaaagaagtgtctgctgcacacagggcccgttacttctggggtaaccttcctggcatgaacaggcctttggcatccactgtgaatgataagctggagctgcaagagtgtctggagcacggcagaatagccaagttcagcaaagtgaggaccattaccaccaggtcaaactctataaagcagggcaaagaccagcatttccccgtcttcatgaacgagaaggaggacatcctgtggtgcactgaaatggaaagggtgtttggcttccccgtccactacacagacgtatccaacatgagccgcttggcgaggcagagactgctgggccgatcgtggagcgtgccggtcatccgccacctcttcgctccgctgaaggaatattttgcttgtgtgtctagcggcaatagtaacgctaacagccgcgggccgagcttcagcagcggcctggtgccgttaagcttgcgcggcagccatatgggccctatggagatatacaagacagtgtctgcatggaagagacagccagtgcgggtactgagcctcttcagaaacatcgacaaggtactaaagagtttgggcttcttggaaagcggttctggttctgggggaggaacgctgaagtacgtggaagatgtcacaaatgtcgtgaggagagatgtggagaaatggggcccctttgacctggtgtacggctcgacgcagcccctaggcagctcttgtgatcgctgtcccggctggtacatgttccagttccaccggatcctgcagtatgcgctgcctcgccaggagagtcagcggcccttcttctggatattcatggacaatctgctgctgactgaggatgaccaagagacaactacccgcttccttcagacagaggctgtgaccctccaggatgtccgtggcagagactaccagaatgctatgcgggtgtggagcaacattccagggctgaagagcaagcatgcgcccctgaccccaaaggaagaagagtatctgcaagcccaagtcagaagcaggagcaagctggacgccccgaaagttgacctcctggtgaagaactgccttctcccgctgagagagtacttcaagtatttttctcaaaactcacttcctcttggagggccgagctctggcgcacccccaccaagtggagggtctcctgccgggtccccaacatctactgaagaaggcaccagcgaatccgcaacgcccgagtcaggccctggtacctccacagaaccatctgaaggtagtgcgcctggttccccagctggaagccctacttccaccgaagaaggcacgtcaaccgaaccaagtgaaggatctgcccctgggaccagcactgaaccatctgaggtggatctacgcacgctcggctacagccagcagcaacaggagaagatcaaaccgaaggttcgttcgacagtggcgcagcaccacgaggcactggtcggccatgggtttacacacgcgcacatcgttgcgctcagccaacacccggcagcgttagggaccgtcgctgtcaagtatcaggacatgatcgcagcgttgccagaggcgacacacgaagcgatcgttggcgtcggcaaacagtggtccggcgcacgcgctctggaggccttgctcacggtggcgggagagttgagaggtccaccgttacagttggacacaggccaacttctcaagattgcaaaacgtggcggcgtgaccgcagtggaggcagtgcatgcatggcgcaatgcactgacgggtgcccccctgaacctgaccccggaccaagtggtggctatcgccagcaacggtggcggcaagcaagcgctcgaaacggtgcagcggctgttgccggtgctgtgccaggaccatggcctgaccccggaccaagtggtggctatcgccagcaacaatggcggcaagcaagcgctcgaaacggtgcagcggctgttgccggtgctgtgccaggaccatggcctgaccccggaccaagtggtggctatcgccagcaacaatggcggcaagcaagcgctcgaaacggtgcagcggctgttgccggtgctgtgccaggaccatggcctgaccccggaccaagtggtggctatcgccagcaacattggcggcaagcaagcgctcgaaacggtgcagcggctgttgccggtgctgtgccaggaccatggcctgaccccggaccaagtggtggctatcgccagcaacaatggcggcaagcaagcgctcgaaacggtgcagcggctgttgccggtgctgtgccaggaccatggcctgaccccggaccaagtggtggctatcgccagcaacggtggcggcaagcaagcgctcgaaacggtgcagcggctgttgccggtgctgtgccaggaccatggcctgactccggaccaagtggtggctatcgccagccacgatggcggcaagcaagcgctcgaaacggtgcagcggctgttgccggtgctgtgccaggaccatggcctgaccccggaccaagtggtggctatcgccagcaacggtggcggcaagcaagcgctcgaaacggtgcagcggctgttgccggtgctgtgccaggaccatggcctgaccccggaccaagtggtggctatcgccagcaacaatggcggcaagcaagcgctcgaaacggtgcagcggctgttgccggtgctgtgccaggaccatggcctgaccccggaccaagtggtggctatcgccagcaacaatggcggcaagcaagcgctcgaaacggtgcagcggctgttgccggtgctgtgccaggaccatggcctgaccccggaccaagtggtggctatcgccagccacgatggcggcaagcaagcgctcgaaacggtgcagcggctgttgccggtgctgtgccaggaccatggcctgaccccggaccaagtggtggctatcgccagcaacattggcggcaagcaagcgctcgaaacggtgcagcggctgttgccggtgctgtgccaggaccatggcctgaccccggaccaagtggtggctatcgccagcaacggtggcggcaagcaagcgctcgaaacggtgcagcggctgttgccggtgctgtgccaggaccatggcctgactccggaccaagtggtggctatcgccagccacgatggcggcaagcaagcgctcgaaacggtgcagcggctgttgccggtgctgtgccaggaccatggcctgactccggaccaagtggtggctatcgccagccacgatggcggcaagcaagcgctcgaaacggtgcagcggctgttgccggtgctgtgccaggaccatggcctgactccggaccaagtggtggctatcgccagccacgatggcggcaagcaagcgctcgaaacggtgcagcggctgttgccggtgctgtgccaggaccatggcctgaccccggaccaagtggtggctatcgccagcaacattggcggcaagcaagcgctcgaaacggtgcagcggctgttgccggtgctgtgccaggaccatggcctgaccccggaccaagtggtggctatcgccagccacgatggcggcaagcaagcgctcgaaagcattgtggcccagctgagccggcctgatccggcgttggccgcgttgaccaacgaccacctcgtcgccttggcctgcctcggcggacgtcctgccatggatgcagtgaaaaagggattgccgcacgcgccggaattgatcagaagagtcaatcgccgtattggcgaacgcacgtcccatcgcgttgcctatccctatgacgtgcccgattatgccagcctgggcagcggctcccccaagaaaaaacgcaaggtggaagatcctaagaaaaagcggaaagtggacggcagcggcagcgagacccccggtaccagcgagagcgccacccccgagagccggacactggtgaccttcaaggatgtatttgtggacttcaccagggaggagtggaagctgctggacactgctcagcagatcgtgtacagaaatgtgatgctggagaactataagaacctggtttccttgggttatcagcttactaagccagatgtgatcctccggttggagaagggagaagagcccctcgaggatggggactaa

SEQ ID NO: 361 - RNA, 5185 nt, synthetic construct
  misc_feature 1..5185: note = V76 mRNA
  source 1..5185: mol_type = other RNA
aggactcactatttgttttcgcgcccagttgcaaaaagtgtcgacatttgcttctgacacaactgtgttcactagcaacctcaaacagacaccgccaccatgaaacggactgctgacggcagcgaatttgagagccccaagaagaagaggaaagtcggatccaaccatgaccaggaatttgaccccccaaaggtttacccacctgtgccagctgagaagaggaagcccatccgcgtgctgtctctctttgatgggattgctacagggctcctggtgctgaaggacctgggcatccaagtggaccgctacattgcctccgaggtgtgtgaggactccatcacggtgggcatggtgcggcaccagggaaagatcatgtacgtcggggacgtccgcagcgtcacacagaagcatatccaggagtggggcccattcgacctggtgattggaggcagtccctgcaatgacctctccattgtcaaccctgcccgcaagggactttatgagggtactggccgcctcttctttgagttctaccgcctcctgcatgatgcgcggcccaaggagggagatgatcgccccttcttctggctctttgagaatgtggtggccatgggcgttagtgacaagagggacatctcgcgatttcttgagtctaaccccgtgatgattgacgccaaagaagtgtctgctgcacacagggcccgttacttctggggtaaccttcctggcatgaacaggcctttggcatccactgtgaatgataagctggagctgcaagagtgtctggagcacggcagaatagccaagttcagcaaagtgaggaccattaccaccaggtcaaactctataaagcagggcaaagaccagcatttccccgtcttcatgaacgagaaggaggacatcctgtggtgcactgaaatggaaagggtgtttggcttccccgtccactacacagacgtatccaacatgagccgcttggcgaggcagagactgctgggccgatcgtggagcgtgccggtcatccgccacctcttcgctccgctgaaggaatattttgcttgtgtgtctagcggcaatagtaacgctaacagccgcgggccgagcttcagcagcggcctggtgccgttaagcttgcgcggcagccatatgggccctatggagatatacaagacagtgtctgcatggaagagacagccagtgcgggtactgagcctcttcagaaacatcgacaaggtactaaagagtttgggcttcttggaaagcggttctggttctgggggaggaacgctgaagtacgtggaagatgtcacaaatgtcgtgaggagagatgtggagaaatggggcccctttgacctggtgtacggctcgacgcagcccctaggcagctcttgtgatcgctgtcccggctggtacatgttccagttccaccggatcctgcagtatgcgctgcctcgccaggagagtcagcggcccttcttctggatattcatggacaatctgctgctgactgaggatgaccaagagacaactacccgcttccttcagacagaggctgtgaccctccaggatgtccgtggcagagactaccagaatgctatgcgggtgtggagcaacattccagggctgaagagcaagcatgcgcccctgaccccaaaggaagaagagtatctgcaagcccaagtcagaagcaggagcaagctggacgccccgaaagttgacctcctggtgaagaactgccttctcccgctgagagagtacttcaagtatttttctcaaaactcacttcctcttggagggccgagctctggcgcacccccaccaagtggagggtctcctgccgggtccccaacatctactgaagaaggcaccagcgaatccgcaacgcccgagtcaggccctggtacctccacagaaccatctgaaggtagtgcgcctggttccccagctggaagccctacttccaccgaagaaggcacgtcaaccgaaccaagtgaaggatctgcccctgggaccagcactgaaccatctgaggtggatctacgcacgctcggctacagccagcagcaacaggagaagatcaaaccgaaggttcgttcgacagtggcgcagcaccacgaggcactggtcggccatgggtttacacacgcgcacatcgttgcgctcagccaacacccggcagcgttagggaccgtcgctgtcaagtatcaggacatgatcgcagcgttgccagaggcgacacacgaagcgatcgttggcgtcggcaaacagtggtccggcgcacgcgctctggaggccttgctcacggtggcgggagagttgagaggtccaccgttacagttggacacaggccaacttctcaagattgcaaaacgtggcggcgtgaccgcagtggaggcagtgcatgcatggcgcaatgcactgacgggtgcccccctgaacctgaccccggaccaagtggtggctatcgccagcaacggtggcggcaagcaagcgctcgaaacggtgcagcggctgttgccggtgctgtgccaggaccatggcctgactccggaccaagtggtggctatcgccagccacgatggcggcaagcaagcgctcgaaacggtgcagcggctgttgccggtgctgtgccaggaccatggcctgaccccggaccaagtggtggctatcgccagcaacattggcggcaagcaagcgctcgaaacggtgcagcggctgttgccggtgctgtgccaggaccatggcctgaccccggaccaagtggtggctatcgccagcaacaatggcggcaagcaagcgctcgaaacggtgcagcggctgttgccggtgctgtgccaggaccatggcctgaccccggaccaagtggtggctatcgccagcaacggtggcggcaagcaagcgctcgaaacggtgcagcggctgttgccggtgctgtgccaggaccatggcctgaccccggaccaagtggtggctatcgccagcaacggtggcggcaagcaagcgctcgaaacggtgcagcggctgttgccggtgctgtgccaggaccatggcctgactccggaccaagtggtggctatcgccagccacgatggcggcaagcaagcgctcgaaacggtgcagcggctgttgccggtgctgtgccaggaccatggcctgaccccggaccaagtggtggctatcgccagcaacattggcggcaagcaagcgctcgaaacggtgcagcggctgttgccggtgctgtgccaggaccatggcctgaccccggaccaagtggtggctatcgccagcaacaatggcggcaagcaagcgctcgaaacggtgcagcggctgttgccggtgctgtgccaggaccatggcctgaccccggaccaagtggtggctatcgccagcaacaatggcggcaagcaagcgctcgaaacggtgcagcggctgttgccggtgctgtgccaggaccatggcctgaccccggaccaagtggtggctatcgccagcaacaatggcggcaagcaagcgctcgaaacggtgcagcggctgttgccggtgctgtgccaggaccatggcctgaccccggaccaagtggtggctatcgccagcaacggtggcggcaagcaagcgctcgaaacggtgcagcggctgttgccggtgctgtgccaggaccatggcctgactccggaccaagtggtggctatcgccagccacgatggcggcaagcaagcgctcgaaacggtgcagcggctgttgccggtgctgtgccaggaccatggcctgaccccggaccaagtggtggctatcgccagcaacggtggcggcaagcaagcgctcgaaacggtgcagcggctgttgccggtgctgtgccaggaccatggcctgaccccggaccaagtggtggctatcgccagcaacaatggcggcaagcaagcgctcgaaacggtgcagcggctgttgccggtgctgtgccaggaccatggcctgaccccggaccaagtggtggctatcgccagcaacattggcggcaagcaagcgctcgaaacggtgcagcggctgttgccggtgctgtgccaggaccatggcctgaccccggaccaagtggtggctatcgccagcaacaatggcggcaagcaagcgctcgaaacggtgcagcggctgttgccggtgctgtgccaggaccatggcctgaccccggaccaagtggtggctatcgccagccacgatggcggcaagcaagcgctcgaaagcattgtggcccagctgagccggcctgatccggcgttggccgcgttgaccaacgaccacctcgtcgccttggcctgcctcggcggacgtcctgccatggatgcagtgaaaaagggattgccgcacgcgccggaattgatcagaagagtcaatcgccgtattggcgaacgcacgtcccatcgcgttgcctatccctatgacgtgcccgattatgccagcctgggcagcggctcccccaagaaaaaacgcaaggtggaagatcctaagaaaaagcggaaagtggacggcagcggcagcgagacccccggtaccagcgagagcgccacccccgagagccggacactggtgaccttcaaggatgtatttgtggacttcaccagggaggagtggaagctgctggacactgctcagcagatcgtgtacagaaatgtgatgctggagaactataagaacctggtttccttgggttatcagcttactaagccagatgtgatcctccggttggagaagggagaagagcccctcgaggatggggactaagatcccaagcacgcagcaatgcagctcaaaacgcttagcctagccacacccccacgggaaacagcagtgattaacctttagcaataaacgaaagtttaactaagctatactaaccccagggttggtcaatttcgtgccagccacaccctggtactgcatgcacgcaatgctagctgcccctttcccgtcctgggcaccccgagtctcccccgaccccgggtcccaggtatgctcccacctccacctgccccactcaccacctctgctagttccagacacctccgagacgaggaaaaaaaaaaaaaaaaaaaaaaaaaaaaaaaaaaaaaaaaaaaaaaaaaaaaaaaaaaaaaaaaaaaaaaaaaaaaaaaaaaaaaaaaaaaaaaaaaaaaaaaaaaaaaaaaaaaaaaaa

SEQ ID NO: 362 - RNA, 5185 nt, synthetic construct
  misc_feature 1..5185: note = V77 mRNA
  source 1..5185: mol_type = other RNA
aggactcactatttgttttcgcgcccagttgcaaaaagtgtcgacatttgcttctgacacaactgtgttcactagcaacctcaaacagacaccgccaccatgaaacggactgctgacggcagcgaatttgagagccccaagaagaagaggaaagtcggatccaaccatgaccaggaatttgaccccccaaaggtttacccacctgtgccagctgagaagaggaagcccatccgcgtgctgtctctctttgatgggattgctacagggctcctggtgctgaaggacctgggcatccaagtggaccgctacattgcctccgaggtgtgtgaggactccatcacggtgggcatggtgcggcaccagggaaagatcatgtacgtcggggacgtccgcagcgtcacacagaagcatatccaggagtggggcccattcgacctggtgattggaggcagtccctgcaatgacctctccattgtcaaccctgcccgcaagggactttatgagggtactggccgcctcttctttgagttctaccgcctcctgcatgatgcgcggcccaaggagggagatgatcgccccttcttctggctctttgagaatgtggtggccatgggcgttagtgacaagagggacatctcgcgatttcttgagtctaaccccgtgatgattgacgccaaagaagtgtctgctgcacacagggcccgttacttctggggtaaccttcctggcatgaacaggcctttggcatccactgtgaatgataagctggagctgcaagagtgtctggagcacggcagaatagccaagttcagcaaagtgaggaccattaccaccaggtcaaactctataaagcagggcaaagaccagcatttccccgtcttcatgaacgagaaggaggacatcctgtggtgcactgaaatggaaagggtgtttggcttccccgtccactacacagacgtatccaacatgagccgcttggcgaggcagagactgctgggccgatcgtggagcgtgccggtcatccgccacctcttcgctccgctgaaggaatattttgcttgtgtgtctagcggcaatagtaacgctaacagccgcgggccgagcttcagcagcggcctggtgccgttaagcttgcgcggcagccatatgggccctatggagatatacaagacagtgtctgcatggaagagacagccagtgcgggtactgagcctcttcagaaacatcgacaaggtactaaagagtttgggcttcttggaaagcggttctggttctgggggaggaacgctgaagtacgtggaagatgtcacaaatgtcgtgaggagagatgtggagaaatggggcccctttgacctggtgtacggctcgacgcagcccctaggcagctcttgtgatcgctgtcccggctggtacatgttccagttccaccggatcctgcagtatgcgctgcctcgccaggagagtcagcggcccttcttctggatattcatggacaatctgctgctgactgaggatgaccaagagacaactacccgcttccttcagacagaggctgtgaccctccaggatgtccgtggcagagactaccagaatgctatgcgggtgtggagcaacattccagggctgaagagcaagcatgcgcccctgaccccaaaggaagaagagtatctgcaagcccaagtcagaagcaggagcaagctggacgccccgaaagttgacctcctggtgaagaactgccttctcccgctgagagagtacttcaagtatttttctcaaaactcacttcctcttggagggccgagctctggcgcacccccaccaagtggagggtctcctgccgggtccccaacatctactgaagaaggcaccagcgaatccgcaacgcccgagtcaggccctggtacctccacagaaccatctgaaggtagtgcgcctggttccccagctggaagccctacttccaccgaagaaggcacgtcaaccgaaccaagtgaaggatctgcccctgggaccagcactgaaccatctgaggtggatctacgcacgctcggctacagccagcagcaacaggagaagatcaaaccgaaggttcgttcgacagtggcgcagcaccacgaggcactggtcggccatgggtttacacacgcgcacatcgttgcgctcagccaacacccggcagcgttagggaccgtcgctgtcaagtatcaggacatgatcgcagcgttgccagaggcgacacacgaagcgatcgttggcgtcggcaaacagtggtccggcgcacgcgctctggaggccttgctcacggtggcgggagagttgagaggtccaccgttacagttggacacaggccaacttctcaagattgcaaaacgtggcggcgtgaccgcagtggaggcagtgcatgcatggcgcaatgcactgacgggtgcccccctgaacctgaccccggaccaagtggtggctatcgccagcaacggtggcggcaagcaagcgctcgaaacggtgcagcggctgttgccggtgctgtgccaggaccatggcctgaccccggaccaagtggtggctatcgccagcaacaatggcggcaagcaagcgctcgaaacggtgcagcggctgttgccggtgctgtgccaggaccatggcctgaccccggaccaagtggtggctatcgccagcaacaatggcggcaagcaagcgctcgaaacggtgcagcggctgttgccggtgctgtgccaggaccatggcctgaccccggaccaagtggtggctatcgccagcaacattggcggcaagcaagcgctcgaaacggtgcagcggctgttgccggtgctgtgccaggaccatggcctgaccccggaccaagtggtggctatcgccagcaacaatggcggcaagcaagcgctcgaaacggtgcagcggctgttgccggtgctgtgccaggaccatggcctgaccccggaccaagtggtggctatcgccagcaacggtggcggcaagcaagcgctcgaaacggtgcagcggctgttgccggtgctgtgccaggaccatggcctgactccggaccaagtggtggctatcgccagccacgatggcggcaagcaagcgctcgaaacggtgcagcggctgttgccggtgctgtgccaggaccatggcctgaccccggaccaagtggtggctatcgccagcaacggtggcggcaagcaagcgctcgaaacggtgcagcggctgttgccggtgctgtgccaggaccatggcctgaccccggaccaagtggtggctatcgccagcaacaatggcggcaagcaagcgctcgaaacggtgcagcggctgttgccggtgctgtgccaggaccatggcctgaccccggaccaagtggtggctatcgccagcaacaatggcggcaagcaagcgctcgaaacggtgcagcggctgttgccggtgctgtgccaggaccatggcctgaccccggaccaagtggtggctatcgccagccacgatggcggcaagcaagcgctcgaaacggtgcagcggctgttgccggtgctgtgccaggaccatggcctgaccccggaccaagtggtggctatcgccagcaacattggcggcaagcaagcgctcgaaacggtgcagcggctgttgccggtgctgtgccaggaccatggcctgaccccggaccaagtggtggctatcgccagcaacggtggcggcaagcaagcgctcgaaacggtgcagcggctgttgccggtgctgtgccaggaccatggcctgactccggaccaagtggtggctatcgccagccacgatggcggcaagcaagcgctcgaaacggtgcagcggctgttgccggtgctgtgccaggaccatggcctgactccggaccaagtggtggctatcgccagccacgatggcggcaagcaagcgctcgaaacggtgcagcggctgttgccggtgctgtgccaggaccatggcctgactccggaccaagtggtggctatcgccagccacgatggcggcaagcaagcgctcgaaacggtgcagcggctgttgccggtgctgtgccaggaccatggcctgaccccggaccaagtggtggctatcgccagcaacattggcggcaagcaagcgctcgaaacggtgcagcggctgttgccggtgctgtgccaggaccatggcctgaccccggaccaagtggtggctatcgccagccacgatggcggcaagcaagcgctcgaaagcattgtggcccagctgagccggcctgatccggcgttggccgcgttgaccaacgaccacctcgtcgccttggcctgcctcggcggacgtcctgccatggatgcagtgaaaaagggattgccgcacgcgccggaattgatcagaagagtcaatcgccgtattggcgaacgcacgtcccatcgcgttgcctatccctatgacgtgcccgattatgccagcctgggcagcggctcccccaagaaaaaacgcaaggtggaagatcctaagaaaaagcggaaagtggacggcagcggcagcgagacccccggtaccagcgagagcgccacccccgagagccggacactggtgaccttcaaggatgtatttgtggacttcaccagggaggagtggaagctgctggacactgctcagcagatcgtgtacagaaatgtgatgctggagaactataagaacctggtttccttgggttatcagcttactaagccagatgtgatcctccggttggagaagggagaagagcccctcgaggatggggactaagatcccaagcacgcagcaatgcagctcaaaacgcttagcctagccacacccccacgggaaacagcagtgattaacctttagcaataaacgaaagtttaactaagctatactaaccccagggttggtcaatttcgtgccagccacaccctggtactgcatgcacgcaatgctagctgcccctttcccgtcctgggcaccccgagtctcccccgaccccgggtcccaggtatgctcccacctccacctgccccactcaccacctctgctagttccagacacctccgagacgaggaaaaaaaaaaaaaaaaaaaaaaaaaaaaaaaaaaaaaaaaaaaaaaaaaaaaaaaaaaaaaaaaaaaaaaaaaaaaaaaaaaaaaaaaaaaaaaaaaaaaaaaaaaaaaaaaaaaaaaaa

SEQ ID NO: 363 - DNA, 20 bp, synthetic construct
  misc_feature 1..20: note = gRNA-PCSK9
  source 1..20: mol_type = other DNA
actgcctggctcactcctcc

SEQ ID NO: 364 - DNA, 20 bp, synthetic construct
  misc_feature 1..20: note = NT gRNA
  source 1..20: mol_type = other DNA
ctgaaggtgtctggcagagc
